(19) United States
(12) Patent Application Publication
(10) Pub. No.: US 2026/0002156 A1
(43) Pub. Date: Jan. 1, 2026

(54) MODULAR RNA DELIVERY PLATFORMS AND METHODS OF THEIR USE

(71) Applicant: ARIZONA BOARD OF REGENTS ON BEHALF OF ARIZONA STATE UNIVERSITY, Scottsdale, AZ (US)

(72) Inventors: Hao YAN, Gilbert, AZ (US); Yang XU, Chandler, AZ (US); Xiaodong QI, Chandler, AZ (US); Lu YU, Tempe, AZ (US); Liangxiao CHEN, Tempe, AZ (US)

(21) Appl. No.: 19/120,697

(22) PCT Filed: Oct. 13, 2023
(86) PCT No.: PCT/US2023/076899

§ 371 Date: Apr. 11, 2025

Related U.S. Application Data
(60) Provisional application No. 63/416,285, filed on Oct. 14, 2022.

(51) Int. Cl. C12N 15/113; A61P 35/00; C07K 14/47; C12N 15/88

(52) U.S. Cl. CPC C12N 15/113; A61P 35/00; C07K 14/47; C12N 15/88; C12N 2310/14; C12N 2310/531

(57) ABSTRACT

Described herein are mRNA carrier systems and methods of their use for entering the cytoplasm and expressing carried mRNA, to induce a tumor killing effect. The mRNA carrier systems can comprise DNA or RNA nanostructures. Also described herein are methods of treating cancer using the mRNA carrier systems described herein.

### RELATED APPLICATIONS

[0001] This disclosure claims priority to U.S. Provisional Application No. 63/416,285, filed Oct. 14, 2022, the contents of which are herein incorporated by reference in their entirety.

### FIELD

[0002] The present invention relates to compositions and methods for treating patients using modular RNA (e.g., small interfering RNA (siRNA), small hairpin RNA (shRNA), and/or mRNA) delivery platforms. The treatment can be based on immunological (e.g., vaccine delivery) and/or gene knockdown (e.g., siRNA, shRNA) approaches. The delivery platforms can include DNA or RNA nanostructures.

### SEQUENCE STATEMENT

[0003] The instant application contains a Sequence Listing, which has been submitted electronically and is hereby incorporated by reference in its entirety. Said file, is named G8118-03601_SEQ_ID_LISTING.xml, created on Oct. 6, 2023, and is 1,713,153 bytes in size.

### INCORPORATION BY REFERENCE

[0004] Throughout this application, various publications are referenced. All documents cited or referenced herein (“herein cited documents”), and all documents cited or referenced in herein cited documents, together with any manufacturer's instructions, descriptions, product specifications, and product sheets for any products mentioned herein or in any document incorporated by reference herein, are hereby incorporated herein by reference, and may be employed in the practice of the invention. More specifically, all referenced documents are incorporated by reference to the same extent as if each individual document was specifically and individually indicated to be incorporated by reference. The disclosures of these publications in their entireties are hereby incorporated by reference into this application in order to more fully describe the state of the art to which this pertains. The references disclosed are also individually and specifically incorporated by reference herein for the material contained in them that is discussed in the sentence in which the reference is relied upon.

### BACKGROUND

[0005] The following includes information that may be useful in understanding the present invention. It is not an admission that any of the information, publications or documents specifically or implicitly referenced herein is prior art, or essential, to the presently described or claimed inventions. All publications, patents, related applications, and other written or electronic materials mentioned or identified herein are hereby incorporated herein by reference in their entirety. The information incorporated is as much a part of the application as filed as if all of the text and other content was repeated in the application, and should be treated as part of the text and content of the application as filed.

[0006] Single stranded RNA (ssRNA) and double stranded RNA (dsRNA) can be detected by pattern recognition receptors in mammalian cells. For example, polyinosinic: polycytidylic acid (polyIC), a synthetic analog of dsRNA, has been widely studied as an adjuvant in treating diseases such as upper respiratory tract infections and tumors, therefore, allowing it to be explored as an adjuvant in flu and cancer vaccines. However, susceptibility of dsRNA to nuclease digestion tends to be a concern especially when they are used in vivo.

[0007] RNA interference (RNAi) is a highly conserved posttranscriptional gene silencing mechanism mediated by small double-stranded RNA molecules. Small interfering RNA (siRNA) or based RNAi therapeutics holds the promise to treat various human diseases most of which are genetic disorders that lack conventional therapies. Most RNAi therapeutics (e.g., patisiran, givosiran, and lumasiran), including several clinical trials, have been focused on the treatment of liver diseases. Messenger RNA (mRNA) delivery is an important component in vaccines against infectious disease.

### SUMMARY

[0008] The inventions described and claimed herein have many attributes and embodiments including, but not limited to, those set forth or described or referenced in this Brief Summary. It is not intended to be all-inclusive and the inventions described and claimed herein are not limited to or by the features or embodiments identified in this introduction, which is included for purposes of illustration only and not restriction.

[0009] In certain aspects, this disclosure provides for RNA sequence (siRNA, shRNA, and/or mRNA) carrier platforms for rapid and targeted delivery of said RNA sequences into cytoplasm of tumor cells and/or immune cells of both innate and adaptive immune systems, which induces a direct tumor killing effect and/or tumor killing effect triggered by the immune system programmed by the RNA sequence delivery platform. Described herein is a nucleic acid (DNA or RNA) nanodevice used to carry small interfering RNA (siRNA), small hairpin RNA (shRNA), or programmed mRNAs (Pro-mRNA) therapeutics to targeted areas. The nucleic acid nanodevices are effective at targeting tumor cells and/or immune cells specifically and safely to deliver therapeutics to the tumor site. The nucleic acid nanodevice comprises a siRNA, shRNA, or Pro-mRNA, and acts as a carrier to deliver said RNA through rapid and targeted siRNA, shRNA, or Pro-mRNA delivery into the cytoplasm of tumor cells and/or immune cells.

[0010] In certain aspects, this disclosure provides for a multivalent RNA oligonucleotide junction delivery complex comprising:
[0011] a. four core RNA oligonucleotides comprising:
[0012] a first RNA oligonucleotide,
[0013] a second RNA oligonucleotide,
[0014] a third RNA oligonucleotide, and
[0015] a fourth RNA oligonucleotide,
[0016] where the a portion of the first RNA oligonucleotide is partially complementary to the second RNA oligonucleotide to form a first arm, and also partially complementary to the fourth RNA oligonucleotide to form a fourth arm;
[0017] where a portion of the second RNA oligonucleotide is partially complementary to the third RNA oligonucleotide to form a second arm, and is also partially complementary to the first RNA oligonucleotide to form the first arm;
[0018] where a portion of the third RNA oligonucleotide is partially complementary to the fourth RNA oligonucleotide to form the third arm and also partially complementary to the second RNA oligonucleotide to form the second arm;
[0019] and wherein a portion of the fourth RNA oligonucleotide is partially complementary to the first RNA oligonucleotide to form the fourth arm, and is partially complementary to the third RNA oligonucleotide to form the third arm;
[0020] b. four peripheral RNA oligonucleotides comprising:
[0021] a first peripheral oligonucleotide;
[0022] a second peripheral oligonucleotide;
[0023] a third peripheral oligonucleotide; and
[0024] a fourth peripheral oligonucleotide,
[0025] wherein the first, second, third, and fourth peripheral oligonucleotides independently comprise a trigger;
[0026] wherein the first second, third, and fourth peripheral oligonucleotides optionally independently comprise two separate discontinuous nucleic acid sequences;
[0027] wherein the first, second, third, and fourth peripheral oligonucleotides are partially or wholly complementary to the first RNA oligonucleotide, second RNA oligonucleotide, third RNA oligonucleotide, or fourth RNA oligonucleotides;
[0028] wherein the trigger is selected from a disulfide-modified sequence, a targeting molecule, an enhancer sequence, a programmed mRNA (Pro-mRNA) sequence, or combinations thereof.

[0029] In some aspects, the first, second, third, and fourth peripheral oligonucleotides each independently comprise DNA, RNA, or both.

[0030] In some aspects, the enhancer sequence initiates the Pro-mRNA sequence translation.

[0031] In some aspects, the enhancer sequence comprises a G-gap independent Internal ribosome entry site (IRES) which can enhance initiation of Pro-mRNA translation. In some aspects, the enhancer sequence comprises a recruiter to a RNA binding protein sequence, wherein the RNA binding protein comprises the eukaryotic initiation factor 3 (elF3) complex. In some aspects, the enhancer and Pro-mRNA sequence are contiguous.

[0032] In some aspects, the four core RNA oligonucleotides arms of the complex form a cross-shape with each arm about at a 90 degree angle to two neighboring arms.

[0033] In some aspects, the targeting molecule is selected from: GalNAc, an affibody, shRNA, or anti-cancer agent. The affibody can be an antibody or portion thereof to ASPH or Her2. In some aspects, the targeting molecule can be GalNAc. In some aspects, the shRNA can include or exclude MCL-1 shRNA (SEQ ID NO: 1500), MCL-12 shRNA (SEQ ID NO: 1501), MCL-34 shRNA (SEQ ID NO: 1502), BCL-XL shR12 (SEQ ID NO: 15), BCL-XL shR13 (SEQ ID NO: 14), or BCL-XL shR34 (SEQ ID NO: 13).

[0034] In some aspects, the complex comprises two Pro-mRNA contiguous sequences with RNA protein binding sites and enhancers, two disulfide-modified peripheral oligonucleotides, and two targeting molecules.

[0035] In some aspects, the Pro-mRNA sequence encodes for a cancer neoantigen. In some aspects, the cancer neoantigen is expressed from all or a portion of a tumor associated gene, in particular a tumor associate gene selected from: AP2S1, Survivin, CTSL, MPZL2, and LSP1. In some aspects, the Pro-mRNA sequence encodes for a portion or all of a viral surface protein. In some aspects, the viral surface protein is a surface protein from SARS-COV-2. In some aspects, the SARS-COV-2 surface protein is a Spike protein(S).

[0036] In some aspects, the Pro-mRNA sequence comprises a Kozak sequence. The Kozak sequence can comprise the sequence AUG. In some aspects, the Pro-mRNA sequence comprises a polyA tail having from 25 to 35 contiguous adenosines. In some aspects, the Pro-mRNA sequence comprises an open reading frame (ORF).

[0037] In some aspects, the Pro-mRNA sequence comprises a long mRNA strand sequence and a plurality of RNA staple strands. In some aspects, the portions of the long mRNA strand are partially complementary to each of the plurality of RNA staple strands such that the Pro-mRNA folds into a selected secondary structure. In some aspects, the secondary structure of the Pro-mRNA is selected from a flat sheet, a tube, a tetrahedron, or a square box. The flat sheet can be in the shape of a square, rectangle, triangle, about circule, or hexagon.

[0038] In some aspects, the Pro-mRNA sequence is about 5,000 to 15,000 bases in length.

[0039] In some aspects, the Pro-mRNA sequence can further comprise a plurality of staple strands each of which comprises a unique sequence and is hybridized to a specific bindable ssRNA region on the Pro-mRNA sequence.

[0040] In some aspects, the targeting molecule can be configured to be at pre-defined positions on the first, second, third, or fourth peripheral oligonucleotides.

[0041] In some aspects, the mRNA strand of the Pro-mRNA complex comprises a T7 promoter sequence (5′-TAATACGACTCACTATAG-3′) (SEQ ID NO:188). In some aspects, the mRNA strand of the Pro-mRNA complex comprises a 5′ G cap. The 5′ G cap can include or exclude: CleanCap AG™, CleanCap GG™, CleanCap AU™, CleanCap AG Ome™, CleanCap AU Ome™ (Trilink Technologies, Inc.), ARCA, 5′ m7G capm, or 5′ m7G cap. In some embodiments, the 5′ G cap can be selected from the caps described in U.S. Pat. Nos. 10,563,195, or 10913768, or U.S. Patent Application No. 63/267,223 (also published as WO2023147352), each of which is herein incorporated by reference.

[0042] In some aspects, this disclosure provides for a pharmaceutical composition comprising the complex as described herin and a pharmaceutically acceptable carrier. The composition can further comprise an anti-cancer agent, including the anti-cancer agents described herein.

[0043] In some aspects, this disclosure provides for a shRNA sequence selected from: MCL-1 shRNA (SEQ ID NO: 1500), MCL-12 shRNA (SEQ ID NO: 1501), MCL-34 shRNA (SEQ ID NO: 1502), BCL-XL shR12 (SEQ ID NO: 15), BCL-XL shR13 (SEQ ID NO: 14), or BCL-XL shR34 (SEQ ID NO: 13). In some aspects, this disclose provides for a lipid nanoparticle comprising a shRNA sequence selected from: MCL-1 shRNA, MCL-12 shRNA, MCL-34 shRNA, BCL-XL shR12, BCL-XL shR13, or BCL-XL shR34.

[0044] In some aspects, this disclosure provides for a method of killing a cancer cell, the method comprising presenting a shRNA sequence selected from MCL-1 shRNA, MCL-12 shRNA, MCL-34 shRNA, BCL-XL shR12, BCL-XL shR13, or BCL-XL shR34, or a multivalent RNA oligonucleotide junction delivery complex to a cancer cell, wherein the complex comprises:
[0045] a. four core RNA oligonucleotides comprising:
[0046] a first RNA oligonucleotide,
[0047] a second RNA oligonucleotide,
[0048] a third RNA oligonucleotide, and
[0049] a fourth RNA oligonucleotide,
[0050] where the a portion of the first RNA oligonucleotide is partially complementary to the
[0051] second RNA oligonucleotide to form a first arm, and also partially complementary to the
[0052] fourth RNA oligonucleotide to form a fourth arm;
[0053] where a portion of the second RNA oligonucleotide is partially complementary to the third RNA oligonucleotide to form a second arm, and is also partially complementary to the first RNA oligonucleotide to form the first arm;
[0054] where a portion of the third RNA oligonucleotide is partially complementary to the fourth RNA oligonucleotide to form the third arm and also partially complementary to the second RNA oligonucleotide to form the second arm;
[0055] and wherein a portion of the fourth RNA oligonucleotide is partially complementary to the first RNA oligonucleotide to form the fourth arm, and is partially complementary to the third RNA oligonucleotide to form the third arm;
[0056] b. four peripheral RNA oligonucleotides comprising:
[0057] a first peripheral oligonucleotide;
[0058] a second peripheral oligonucleotide;
[0059] a third peripheral oligonucleotide; and
[0060] a fourth peripheral oligonucleotide,
[0061] wherein the first, second, third, and fourth peripheral oligonucleotides independently comprise a trigger;
[0062] wherein the first second, third, and fourth peripheral oligonucleotides optionally independently comprise two separate discontinuous nucleic acid sequences;
[0063] wherein the first, second, third, and fourth peripheral oligonucleotides are partially or wholly complementary to the first RNA oligonucleotide, second RNA oligonucleotide, third RNA oligonucleotide, or fourth RNA oligonucleotides;
[0064] wherein the trigger is selected from a disulfide-modified sequence, a targeting molecule, an enhancer sequence, a programmed mRNA (Pro-mRNA) sequence, or combinations thereof.

[0065] In some aspects, this disclosure relates to a method of treating cancer in a subject in need thereof, the method comprising administering to the subject a therapeutically effective amount of a composition comprising a lipid nanoparticle comprising a shRNA selected from: MCL-1 shRNA, MCL-12 shRNA, MCL-34 shRNA, BCL-XL shR12, BCL-XL shR13, or BCL-XL shR34, or a multivalent RNA oligonucleotide junction delivery complex to a subject, wherein the complex comprises:

[0066] a. four core RNA oligonucleotides comprising:

[0067] a first RNA oligonucleotide,
[0068] a second RNA oligonucleotide,
[0069] a third RNA oligonucleotide, and
[0070] a fourth RNA oligonucleotide,
[0071] where the a portion of the first RNA oligonucleotide is partially complementary to the
[0072] second RNA oligonucleotide to form a first arm, and also partially complementary to the
[0073] fourth RNA oligonucleotide to form a fourth arm;

[0074] where a portion of the second RNA oligonucleotide is partially complementary to the
[0075] third RNA oligonucleotide to form a second arm, and is also partially complementary to the first RNA oligonucleotide to form the first arm;

[0076] where a portion of the third RNA oligonucleotide is partially complementary to the fourth RNA oligonucleotide to form the third arm and also partially complementary to the second RNA oligonucleotide to form the second arm;

[0077] and wherein a portion of the fourth RNA oligonucleotide is partially complementary to
[0078] the first RNA oligonucleotide to form the fourth arm, and is partially complementary to
[0079] the third RNA oligonucleotide to form the third arm;
[0080] b. four peripheral RNA oligonucleotides comprising:
[0081] a first peripheral oligonucleotide;
[0082] a second peripheral oligonucleotide;
[0083] a third peripheral oligonucleotide; and
[0084] a fourth peripheral oligonucleotide,
[0085] wherein the first, second, third, and fourth peripheral oligonucleotides independently comprise a trigger;
[0086] wherein the first second, third, and fourth peripheral oligonucleotides optionally independently comprise two separate discontinuous nucleic acid sequences;
[0087] wherein the first, second, third, and fourth peripheral oligonucleotides are partially or wholly complementary to the first RNA oligonucleotide, second RNA oligonucleotide, third RNA oligonucleotide, or fourth RNA oligonucleotides;
[0088] wherein the trigger is selected from a disulfide-modified sequence, a targeting molecule, an enhancer sequence, a programmed mRNA (Pro-mRNA) sequence, or combinations thereof.

[0089] In some aspects of the methods, the cancer is a colorectal cancer, pancreatic cancer, breast cancer, ovarian cancer, lung cancer or melanoma.

[0090] In some aspects, the method further comprises administering to the subject a therapeutically effective amount of at least one anti-cancer agent.

[0091] The use of a multivalent RNA oligonucleotide junction delivery complex in the preparation of a medicament for the treatment of cancer,
[0092] wherein the complex comprises:
[0093] a. four core RNA oligonucleotides comprising:
[0094] a first RNA oligonucleotide,
[0095] a second RNA oligonucleotide,
[0096] a third RNA oligonucleotide, and
[0097] a fourth RNA oligonucleotide,
[0098] where the a portion of the first RNA oligonucleotide is partially complementary to the second RNA oligonucleotide to form a first arm, and also partially complementary to the fourth RNA oligonucleotide to form a fourth arm;
[0099] where a portion of the second RNA oligonucleotide is partially complementary to the third RNA oligonucleotide to form a second arm, and is also partially complementary to the first RNA oligonucleotide to form the first arm;
[0100] where a portion of the third RNA oligonucleotide is partially complementary to the fourth RNA oligonucleotide to form the third arm and also partially complementary to the second RNA oligonucleotide to form the second arm;
[0101] and wherein a portion of the fourth RNA oligonucleotide is partially complementary to the first RNA oligonucleotide to form the fourth arm, and is partially complementary to the third RNA oligonucleotide to form the third arm;
[0102] b. four peripheral RNA oligonucleotides comprising:
[0103] a first peripheral oligonucleotide;
[0104] a second peripheral oligonucleotide;
[0105] a third peripheral oligonucleotide; and
[0106] a fourth peripheral oligonucleotide,
[0107] wherein the first, second, third, and fourth peripheral oligonucleotides independently comprise a trigger;
[0108] wherein the first second, third, and fourth peripheral oligonucleotides optionally independently comprise two separate discontinuous nucleic acid sequences;
[0109] wherein the first, second, third, and fourth peripheral oligonucleotides are partially or wholly complementary to the first RNA oligonucleotide, second RNA oligonucleotide, third RNA oligonucleotide, or fourth RNA oligonucleotides;
[0110] wherein the trigger is selected from a disulfide-modified sequence, a targeting molecule, an enhancer sequence, a programmed mRNA (Pro-mRNA) sequence, or combinations thereof.

[0111] In some aspects of the use, the cancer is selected from a colorectal cancer, pancreatic cancer, breast cancer, ovarian cancer, lung cancer or melanoma.

[0112] In some aspects, this disclosure provides for a lipid nanoparticle comprising a lipid and a multivalent RNA oligonucleotide junction delivery complex to a cancer cell, wherein the complex comprises:
[0113] a. four core RNA oligonucleotides comprising:
[0114] a first RNA oligonucleotide,
[0115] a second RNA oligonucleotide,
[0116] a third RNA oligonucleotide, and
[0117] a fourth RNA oligonucleotide,
[0118] where the a portion of the first RNA oligonucleotide is partially complementary to the second RNA oligonucleotide to form a first arm, and also partially complementary to the fourth RNA oligonucleotide to form a fourth arm;
[0119] where a portion of the second RNA oligonucleotide is partially complementary to the third RNA oligonucleotide to form a second arm, and is also partially complementary to the first RNA oligonucleotide to form the first arm;
[0120] where a portion of the third RNA oligonucleotide is partially complementary to the fourth RNA oligonucleotide to form the third arm and also partially complementary to the second RNA oligonucleotide to form the second arm;
[0121] and wherein a portion of the fourth RNA oligonucleotide is partially complementary to the first RNA oligonucleotide to form the fourth arm, and is partially complementary to the third RNA oligonucleotide to form the third arm;
[0122] b. four peripheral RNA oligonucleotides comprising:
[0123] a first peripheral oligonucleotide;
[0124] a second peripheral oligonucleotide;
[0125] a third peripheral oligonucleotide; and
[0126] a fourth peripheral oligonucleotide,
[0127] wherein the first, second, third, and fourth peripheral oligonucleotides independently comprise a trigger;
[0128] wherein the first second, third, and fourth peripheral oligonucleotides optionally independently comprise two separate discontinuous nucleic acid sequences;
[0129] wherein the first, second, third, and fourth peripheral oligonucleotides are partially or wholly complementary to the first RNA oligonucleotide, second RNA oligonucleotide, third RNA oligonucleotide, or fourth RNA oligonucleotides;
[0130] wherein the trigger is selected from a disulfide-modified sequence, a targeting molecule, an enhancer sequence, a programmed mRNA (Pro-mRNA) sequence, or combinations thereof.

[0131] In some aspects, this disclosure provides for a method of inducing an immune response in a subject, the method comprising administering to the subject a multivalent RNA oligonucleotide junction delivery complex to a cancer cell, wherein the complex comprises:
[0132] a. four core RNA oligonucleotides comprising:
[0133] a first RNA oligonucleotide,
[0134] a second RNA oligonucleotide,
[0135] a third RNA oligonucleotide, and
[0136] a fourth RNA oligonucleotide,
[0137] where the a portion of the first RNA oligonucleotide is partially complementary to the second RNA oligonucleotide to form a first arm, and also partially complementary to the fourth RNA oligonucleotide to form a fourth arm;
[0138] where a portion of the second RNA oligonucleotide is partially complementary to the third RNA oligonucleotide to form a second arm, and is also partially complementary to the first RNA oligonucleotide to form the first arm;
[0139] where a portion of the third RNA oligonucleotide is partially complementary to the fourth RNA oligonucleotide to form the third arm and also partially complementary to the second RNA oligonucleotide to form the second arm;
[0140] and wherein a portion of the fourth RNA oligonucleotide is partially complementary to the first RNA oligonucleotide to form the fourth arm, and is partially complementary to the third RNA oligonucleotide to form the third arm;
[0141] b. four peripheral RNA oligonucleotides comprising:
[0142] a first peripheral oligonucleotide;
[0143] a second peripheral oligonucleotide;
[0144] a third peripheral oligonucleotide; and
[0145] a fourth peripheral oligonucleotide,
[0146] wherein the first, second, third, and fourth peripheral oligonucleotides independently comprise a trigger;
[0147] wherein the first second, third, and fourth peripheral oligonucleotides optionally independently comprise two separate discontinuous nucleic acid sequences;
[0148] wherein the first, second, third, and fourth peripheral oligonucleotides are partially or wholly complementary to the first RNA oligonucleotide, second RNA oligonucleotide, third RNA oligonucleotide, or fourth RNA oligonucleotides;
[0149] wherein the trigger is selected from a disulfide-modified sequence, a targeting molecule, an enhancer sequence, a programmed mRNA (Pro-mRNA) sequence, or combinations thereof.

[0150] In some aspects, this disclosure provides for a RNA oligonucleotide carrier comprising:
[0151] a. a nucleic acid nanodevice comprising a single sheet of double stranded DNA or RNA (dsDNA or dsRNA) which comprises at least four edges of which at least two opposite edges independently comprise a single stranded DNA or RNA region, and further comprising a first surface and a second surface;
[0152] b. a targeting antibody configured to be on the first surface, which is optionally anti-Aspartate beta-hydroxylase; and
[0153] c. a locking peptide conjugated at both the C-and N-terminus independently with a peptide-linked single-stranded oligonucleotide, wherein at least a portion of each said peptide-linked single-stranded oligonucleotide is complementary to at least a portion of one of said single stranded DNA or RNA regions,
[0154] wherein the first and second surfaces of the dsDNA or dsRNA each independently further comprise one or a plurality of bindable single-stranded DNA or RNA (ssDNA or ssRNA) regions.

[0155] In some aspects, the linear disulfide (LD)-modified siRNA comprises: 5 repeated LD units introduced at the 5′ end of the passenger strand and the 3′ ends of the guide strand. In some aspects, the small RNA oligonucleotide carrier does not result in RNA-induced silencing complex (RISC) formation because of the introduction of the LD unit to the 5′ end of the guide strand.

[0156] In some aspects, the single dsDNA or dsRNA sheet can be of about 5,000 to 10,000 bases in length.

[0157] In some aspects, the dsDNA or dsRNA can further comprise a plurality of staple strands each of which comprises a unique sequence and is hybridized to a specific bindable ssDNA or ssRNA region.

[0158] In some aspects, the dsDNA or dsRNA can further comprises one or more fastener strands of DNA, wherein the one or more fastener strands of DNA or RNA is capable of fastening the sheet into an nanostructure. In some aspects, the nanostructure is a tube. In some aspects, the nanostructure is a sheet. In some aspects, the nanostructure is DNA or RNA origami.

[0159] In some aspects, the one or a plurality of bindable single-stranded DNA or RNA (ssDNA or ssRNA) regions can be operably linked to a targeting moiety selected from an antibody to a cancer cell surface-expressing protein, a lipid bilayer anchor, a siRNA sequence modified with a sulfide modifier, Programmed mRNA (Pro-mRNA), short hairpin RNA shRNA sequence (shRNA), or combinations thereof. The disulfide modifier can be a penta-disulfide modifier.

[0160] The operable linkage can be through conjugation through the same oligonucleotide sequence such that the targeting moiety is conjugated to the bindable ssDNA or ssRNA. The operable linkage can be through hybridization of the bindable ssDNA or ssRNA to a complement oligonucleotide sequence which is conjugated to the targeting moiety. The RNA oligonucleotide carrier can comprise at least two bindable ssDNA or ssRNA regions, wherein a first bindable ssDNA or ssRNA region is configured to be on a first surface and comprises an antibody to a cancer cell surface-expressing protein or a lipid bilayer anchor, and a second bindable ssDNA or ssRNA region configured to be on a second surface and comprises a siRNA sequence modified with a sulfide modifier or a shRNA sequence. In some aspects, there are two shRNA sequences. The two shRNA sequences can be selected from MCL-1 shRNA, MCL-12 shRNA, MCL-34 shRNA, BCL-XL shR12, BCL-XL shR13, or BCL-XL shR34.

[0161] In some aspects, the lipid membrane anchor can be selected from cholesterol, a fatty acid alcohol, or a fatty acid ether. In some aspects, the fatty acid alcohol is selected from decanol, dodecanol, tetradecanol, or octadecanol. In some aspects, the lipid membrane anchor is chemically conjugated through a modified alcohol group to the targeting oligonucleotide.

[0162] In some aspects, the locking peptide is an ADAM10 substrate.

[0163] In some aspects, the nucleic acid nanodevice is in a tubular shape.

[0164] In some aspects, the targeting moieties is configured to be at pre-defined positions on the single sheet of dsDNA or dsRNA.

[0165] In some aspects, this disclosure provides for a pharmaceutical composition comprising the RNA oligonucleotide carrier as described herin and a pharmaceutically acceptable carrier. The composition can further comprise an anti-cancer agent, including the anti-cancer agents described herein.

[0166] In some aspects, this disclosure provides for a method of presenting shRNA or siRNA into a cell, the method comprising:
[0167] a. contacting a cell comprising an ADAM10 surface protein and an ASPH surface protein with a RNA oligonucleotide carrier wherein the carrier is in a tubular shape,
[0168] b. cleaving the locking peptide with the ADAM10 surface protein,
[0169] c. opening the RNA oligonucleotide carrier from a tubular shape to a semi-flat shape, and
[0170] d. presenting disulfuide-modified siRNA, and/or shRNA, into the cell, wherein the RNA oligonucleotide carrier comprises:
   [0171] i. a nucleic acid nanodevice comprising a single sheet of double stranded DNA or RNA (dsDNA or dsRNA) which comprises at least four edges of which at least two opposite edges independently comprise a single stranded DNA or RNA region, and further comprising a first surface and a second surface;
   [0172] ii. a targeting antibody configured to be on the first surface, which is optionally anti-Aspartate beta-hydroxylase; and
   [0173] iii. a locking peptide conjugated at both the C- and N-terminus independently with a peptide-linked single-stranded oligonucleotide, wherein at least a portion of each said peptide-linked single-stranded oligonucleotide is complementary to at least a portion of one of said single stranded DNA or RNA regions, wherein the first and second surfaces of the dsDNA or dsRNA each independently further comprise one or a plurality of bindable single-stranded DNA or RNA (ssDNA or ssRNA) regions.

[0174] In some aspects, this disclosure provides for a RNA oligonucleotide carrier comprising:
[0175] a. a single-sheet of a single sheet of double stranded DNA or RNA (dsDNA or dsRNA) which comprises a first surface and a second surface;
[0176] b. one or a plurality of cancer cell-targeting antibodies configured to be on the first surface of said single sheet of dsDNA or dsRNA;
[0177] c. one or a plurality of lipid membrane anchors configured to be on the second surface of said single sheet of dsDNA or dsRNA, wherein a membrane anchor is in contact with a lipid nanoparticle or cell,
[0178] wherein the lipid nanoparticle or cell comprises a RNA oligonucleotide and/or an anti-cancer agent, and
[0179] wherein the first and second surfaces of the dsDNA or dsRNA each independently further comprise one or a plurality of bindable single-stranded DNA or RNA (ssDNA or ssRNA) regions.

[0180] The one or a plurality of bindable single-stranded DNA or RNA (ssDNA or ssRNA) regions can be operably linked to said lipid membrane anchor, or to said targeting antibody, or both. The targeting antobidy can be an antibody to ASPH. The lipid membrane anchor can be selected from cholesterol, fatty acid alcohol, or fatty acid ether. The fatty acid alcohol can be selected from: decanol, dodecanol, tetradecanol, or octadecanol.

[0181] In some aspects, the RNA oligonucleotide is within a smart RNA oligonucleotide complex as described herein.

[0182] In aspects, this disclosure provides for a smart RNA oligonucleotide complex comprising:
[0183] a. a carrier molecule;
[0184] b. a first heterodouble shRNA molecule which comprises 2 loops region and a trigger oligonucleotide can be complementary to at least a portion of sites at the 3′-ends of said shRNA molecule;
[0185] c. a second heterodouble shRNA molecule which 2 loops region and a trigger oligonucleotide can be complementary to at least a portion of sites at the 5′-ends of said shRNA molecule; and
[0186] d. one or a plurality of conditional logic RNA molecules which release in the presence of a trigger event.

[0187] In some aspects, the shRNA molecules can connect to the conditional logic RNA molecules, and connect to the carrier molecule. The conditional logic RNA molecules can be antisense RNA molecules against tumor cell specific mRNAs. The tumor cell specific mRNA can be ASPH mRNA.

[0188] In some aspects, this disclosure provides for a RNA oligonucleotide carrier which is a multivalent siRNA oligonucleotide junction delivery complex comprising: three, four, or six RNA oligonucleotides which form three, four, or six arms, repectively; wherein each of the arms are a Dicer enzyme substrate. In some aspects, each of the arms can further comprise a peripheral end, and wherein said peripheral end comprises two non-complementary strands such that at least a portion of the arm comprises two separate single stranded RNA sequences. The two separate single stranded RNA sequences together can hybridize to a trigger RNA sequence, wherein the trigger RNA sequence can be a complement of a portion of an mRNA sequence in a cancer cell, optionally an ASPH mRNA sequence. The ASPH gene, for which the mRNA is based, can be found at: chr8: 61,500,556-61,714,640 (GRCh38/hg38), Size: 214,085 bases, Orientation: Minus strand. In some aspects, the ASPH mRNA sequence is selected from: NM_001164750.2, NM_001164751.2, NM_001164752.2, NM_001164753.2, NM_001164754.2, NM_001164755.2, NM_001164756.2, NM_004318.4, NM_020164.5, NM_032466.4, NM_032467.4, and NM_032468.5, the sequences of which are well-known in the art and available at: www.genecards.org/cgi-bin/carddisp.pl?gene=ASPH). In some aspects, the trigger RNA sequence is modified with polyethylene glycol (PEG), a lipid, and/or a targeting molecule. In aspects, the targeting molecule is an shRNA, antibody or portion thereof to ASPH (ASPH-Aspartyl/asparaginyl beta-hydroxylase). In some aspects, the targeting molecule is GalNAc. In some aspects, the shRNA can include or exclude MCL-1 shRNA, MCL-12 shRNA, MCL-34 shRNA, BCL-XL shR12, BCL-XL shR13, or BCL-XL shR34

[0189] In some aspects, this disclosure provides for a RNA oligonucleotide carrier which is a multivalent siRNA oligonucleotide junction delivery complex comprising: three, four, or six RNA oligonucleotides which form three, four, or six arms, repectively; wherein each of the arms is a Dicer enzyme substrate. In some aspects, each of the arms can further comprise a peripheral end, and wherein said peripheral end comprises two non-complementary strands such that at least a portion of the arm comprises two separate single stranded RNA sequences. The two separate single stranded RNA sequences together can hybridize to a trigger RNA sequence, wherein the trigger RNA sequence can be a complement of a portion of an mRNA sequence in a cancer cell, optionally an ASPH mRNA sequence. In aspects, the trigger RNA sequence is modified with polyethylene glycol (PEG), a lipid, and/or a targeting molecule. In aspects, the targeting molecule can be an antibody or portion thereof to ASPH. In aspects, the targeting molecule is GalNAc.

[0190] The Dicer enzyme cleaves double-stranded RNA (dsRNA) and pre-microRNA (pre-miRNA) into short double-stranded RNA fragments referred to as small interfering RNA and microRNA, respectively. These aforementioned fragments are about 20-25 base pairs long and comprise a two-base overhang on the 3′-end.

[0191] In some aspects, this disclosure provides for a programmed mRNA (Pro-mRNA) complex comprising:
[0192] a. a mRNA strand; and
[0193] b. a plurality of RNA staple strands,
[0194] wherein the mRNA is folded into a configuration with the RNA staple strands into a compact RNA nanostructure comprising a plurality of helixes.

[0195] In some aspects, the mRNA strand of the Pro-mRNA complex comprises a T7 promoter sequence (5′-TAATACGACTCACTATAG-3′) (SEQ ID NO:188). In some aspects, the mRNA strand of the Pro-mRNA complex comprises a 5′ G cap. The 5′ G cap can include or exclude: CleanCap AG™, CleanCap GG™, CleanCap AU™, CleanCap AG Ome™, CleanCap AU Ome™ (Trilink Technologies, Inc.), ARCA, 5′ m7G capm, or 5′ m7G cap. In some embodiments, the 5′ G cap is selected from the caps described in U.S. Pat. Nos. 10,563,195, or 10913768, or U.S. Patent Application No. 63/267,223 (also published as WO2023147352), each of which is herein incorporated by reference.

[0196] In some aspects, the RNA nanostructure of the Pro-mRNA complex is a shape having a 6-helix bundle.

[0197] In some aspects, the Pro-mRNA complex is resistant to nuclease degradation.

[0198] In some aspects, the mRNA strand of the Pro-mRNA complex comprises a 5′ untranslated region (UTR) and a 3′ UTR. In some aspects, the 5′ UTR and the 3′ UTR are spatially separated in the Pro-mRNA complex. In some aspects, the 5′ UTR and the 3′ UTR are spatially substantially adjacent to each other.

[0199] In some aspects, the mRNA strand of the Pro-mRNA complex is circularized.

[0200] In some aspects, the mRNA of the Pro-mRNA complex encodes for a modified infectious disease surface protein or therapeutic proteins or surface receptor proteins of immune cells of both innate and adaptive immune systems for programmed in-vivo cell engineering and in-vivo cell therapy (in vivo NK cell therapy and/or in vivo T cell therapy).

[0201] In some aspects, the mRNA strand of the Pro-mRNA complex encodes for a immunogenic neoantigen protein.

[0202] In some aspects, this disclosure provides for a method of inducing an immune response in a subject, the method comprising administering to the subject the Pro-mRNA complex comprising a mRNA strand and a plurality of RNA staple strands, wherein the mRNA is folded into a configuration with the RNA staple strands into a compact RNA nanostructure comprising a plurality of helixes, wherein the Pro-mRNA complex enters a cell comprising cytosol, and the mRNA strand then dissociates from the RNA staple strands in the cytosol.

[0203] In some aspects, the Pro-mRNA complex is part of a multivalent RNA oligonucleotide junction delivery complex comprising:
[0204] a. four core RNA oligonucleotides comprising:
[0205] a first RNA oligonucleotide,
[0206] a second RNA oligonucleotide,
[0207] a third RNA oligonucleotide, and
[0208] a fourth RNA oligonucleotide,
[0209] where the a portion of the first RNA oligonucleotide is partially complementary to the second RNA oligonucleotide to form a first arm, and also partially complementary to the fourth RNA oligonucleotide to form a fourth arm;
[0210] where a portion of the second RNA oligonucleotide is partially complementary to the third RNA oligonucleotide to form a second arm, and is also partially complementary to the first RNA oligonucleotide to form the first arm;
[0211] where a portion of the third RNA oligonucleotide is partially complementary to the fourth RNA oligonucleotide to form the third arm and also partially complementary to the second RNA oligonucleotide to form the second arm;
[0212] and wherein a portion of the fourth RNA oligonucleotide is partially complementary to the first RNA oligonucleotide to form the fourth arm, and is partially complementary to the third RNA oligonucleotide to form the third arm;
[0213] b. four peripheral RNA oligonucleotides comprising:
[0214] a first peripheral oligonucleotide;
[0215] a second peripheral oligonucleotide;
[0216] a third peripheral oligonucleotide; and
[0217] a fourth peripheral oligonucleotide,
[0218] wherein the first, second, third, and fourth peripheral oligonucleotides independently comprise a trigger;
[0219] wherein the first second, third, and fourth peripheral oligonucleotides optionally independently comprise two separate discontinuous nucleic acid sequences;
[0220] wherein the first, second, third, and fourth peripheral oligonucleotides are partially or wholly complementary to the first RNA oligonucleotide, second RNA oligonucleotide, third RNA oligonucleotide, or fourth RNA oligonucleotides;
[0221] wherein the trigger is selected from a disulfide-modified sequence, a targeting molecule, an enhancer sequence, a programmed mRNA (Pro-mRNA) sequence, or combinations thereof.

[0222] In some aspects, the enhancer and Pro-mRNA sequences are contiguous.

[0223] In some aspects, the targeting molecule is selected from: GalNAc, an affibody, or anti-cancer agent. The affibody can be an affibody to Her2 or ASPH.

[0224] In some aspects, there are two Pro-mRNA contiguous with RNA protein binding sites and enhancers, two disulfide-modified peripheral oligonucleotides, and two targeting molecules.

[0225] In some aspects, the Pro-mRNA encodes for a cancer neoantigen. The cancer neoantigen can be expressed from a tumor associated gene, which can include or exclude a gene selected from: AP2S1, Survivin, CTSL, MPZL2, and LSP1.

[0226] In some aspects, the Pro-mRNA comprises a Kozak sequence. The Kozak sequence can comprises the sequence AUG. In some aspects, the Pro-mRNA can comprise a polyA tail having from 25 to 35 contiguous adenosines. In certain aspects, the polyA tail is 30 contiguous adenosine bases.

[0227] In some aspects, the Pro-mRNA comprises an open reading frame (ORF). The the Pro-mRNA can comprises a long mRNA strand and a plurality of RNA staple strands. The portions of the long mRNA strand are partially complementary to each of the plurality of RNA staple strands such that the Pro-mRNA folds into a selected shape. The shape can be selected from a 3-D tube, sheet, triangle, or hexagon, or any of the DNA or RNA origami shapes described herein.

[0228] The invention also provides processes disclosed herein that are useful for preparing the RNA oligonucleotide carrier systems as described herein or a composition as described herein.

[0229] In some aspects, this disclosure provides for a method of killing a cancer cell, the method comprising presenting a RNA oligonucleotide carrier or complex described herein to a cancer cell. The cancer cell can be selected from a colorectal cancer, pancreatic cancer, breast cancer, ovarian cancer, lung cancer or melanoma.

[0230] In some aspects, this disclosure provides for a method of treating cancer in a subject in need thereof, the method comprising administering to the subject a therapeutically effective amount of a composition comprising a RNA oligonucleotide carrier or complex as described herein to a subject. The cancer can be a colorectal cancer, pancreatic cancer, breast cancer, ovarian cancer, lung cancer or melanoma. In some aspects, the method can further comprise administering to the subject a therapeutically effective amount of at least one anti-cancer agent.

[0231] In some aspects, this disclosure provides a kit comprising a pharmaceutical composition as described herein and an additional anti-cancer agent.

### BRIEF DESCRIPTION OF DRAWINGS

[0232] The following detailed description, given by way of example, but not intended to limit the invention solely to the specific embodiments described, may best be understood in conjunction with the accompanying drawings.

[0233] FIG. 1A depicts a schematic of the one embodiment of a Nucleic acid nanodevice designed to target ASPH protein, controlled open upon peptide lock cleavage by ADAM10, and cytosolic internalization via thiol-mediated uptake. The shRNAs trigger the RNAi for tumor cell apoptosis.

[0234] FIG. 1B depicts a schematic for a representative embodiment of the components of a representative Nucleic acid nanodevice for targeted shRNA delivery. The Nucleic acid nanodevice comprises a scaffold DNA or RNA strand, staple strands, and is further functionalized with a targeting moiety, e.g., an ASPH-targeting moiety (which can include or exclude an ASPH-antibody, aptamer, or binding portion thereof), a disulfide-conjugated DNA or RNA, and one or a plurality of shRNA sequences (which can include or exclude MCL-1 shRNA (SEQ ID NO: 1500), MCL-12 shRNA (SEQ ID NO: 1501), MCL-34 shRNA (SEQ ID NO: 1502), BCL-XL shR12 (SEQ ID NO: 15), BCL-XL shR13 (SEQ ID NO: 14), or BCL-XL shR34 (SEQ ID NO: 13), and an enzyme substrate, e.g., an ADAM10 cleavable peptide (which can include or exclude an ADAM10 peptidase substrate).

[0235] FIG. 2A shows gene silencing by representative hetero-double shRNAs of this disclosure, in particular knockdown of the Mcl-1 protein by hetero-double shRNA. Hep3B cells were transfected with the indicated hetero-double shRNA. After shRNA transfection, cells were lysed and subject to Western blot assay.

[0236] FIG. 2B shows the knockdown of the anti-apoptotic Bcl-xl protein by the indicated pools of siRNA.

[0237] FIG. 2C shows the effects of the combinatorial siRNA knockdown of Mcl-1 and Bcl-xl protein on the colonies of Hep3B cells.

[0238] FIG. 3 shows the results of a fluorogenicpeptide cleavage assay. Substrate peptide (Mca-PLAQAV-Dpa-RSSR) exhibits stronger fluorescence upon incubation with HCC cancer cells, comparing with PBS negative control or a recombinant human ADAM10 protein.

[0239] FIG. 4 shows the cellular uptake of a representative nucleic acid nanostructure of this disclosure. Confocal images of HeLa cells incubated with FAM-ADO, open FAM-5-DADO, and closed FAM-5-DADO for 1 hour. Red color (darker grey) represents lysotracker dye. Scale bar: 25 microns.

[0240] FIG. 5 is a schematic of LNP loaded with targeting molecules. The cholesterol modified DNA oligonucleotides are loaded onto the LNP surface through the fusion of cholesterol and lipid. The targeting molecule is conjugated to complimentary DNA or RNA oligonucleotides which hybridize to the cholesterol modified nucleic acid, directing LNP to specific target cells.

[0241] FIG. 6A shows a scheme and supporting data for a representative Programmable DNA or RNA nanostructure platform of this disclosure for targeted delivery of LNP. In particular, FIG. 6A. is a schematic of a DNA or RNA nanostructure design with targeting antibodies loaded on one surface of the nanostructure and cholesterol modification on a second surface of the nanostructure.

[0242] FIG. 6B. is an AFM image of the DNA nanostructure. The scale bar is 200 nm.

[0243] FIG. 6C. is a schematic of the LNP with DNA or RNA nanostructure platform for specific delivery to target cells.

[0244] FIG. 6D is confocal images of SUVs attached with FAM labeled DNA nanostructures modified with and without cholesterol. Scale bar: 50 μm.

[0245] FIG. 7A is a schematic of a representative embodiment of an intelligent shRNA delivery platform of this disclosure.

[0246] FIG. 7B shows the knockdown of the anti-apoptotic Bcl-xl protein by the indicated pools of siRNA. The top image is an agarose gel image of N/P determination of shRNA-liposome nanoparticle (Western Blot in HepG2 cells for 48h). The liposome compositions were prepared with N/P ratio of, 3 and 5 and were compared with lipofectamine. The bottom chart is the histography of Mcl-1 protein expression.

[0247] FIG. 8A is a schematic of multivalent siRNAs. In particular, FIG. 8A depicts a siRNAs design with 3, 4, or 6 RNA molecules connected to form three-way, four-way, and six-way junctions, respectively.

[0248] FIG. 8B is a schematic drawing of smart release design. Trigger RNA molecules hybridize with the four-way junction siRNA design which protect the free ends and provide selective release of siRNA molecules. Modification with PEG and/or lipid on the trigger RNA further enhances the cellular stability, while targeting molecule conjugation (e.g. GalNAc, antibody, small molecule drug) enables delivery specificity.

[0249] FIG. 8C is a schematic drawing of one embodiment of the smart release design. A multivalent programmable messenger RNA target delivery of mRNA molecules is depicted wherein the complex comprises RNA oligonucleotides, enhancer sequences to promote nanostructured mRNA translation, and disulfide modified oligonucleotides to promote cytostolic internalization.

[0250] FIG. 9 is a schematic of siRNA-coupled pRNA nanostrutcure. A mixture of mRNA, short RNA staples and RNA staples containing siRNA sequence can assemble into a programmable RNA nanostructure. The mRNA can express targeting protein (bottom left), and the siRNA can form RISC to digest target gene. The siRNA strands present at the surface of the hexagonally packed helic of double-stranded mRNA and stables strands, and are partially unhybridized.

[0251] FIG. 10 shows confocal microscopy images tracking the cellular uptake and intracellular distribution of representative disulfide modified DNA nanostructures of this disclosure. The Left panel is the schematic drawing of DNA nanostructures with or without disulfide modification. The Right panel is the confocal images of HeLa cells that incubated with DNA nanostructure in 2 hr. The FAM-DNA nanostructure panel shows the presence of DNA nanostructures; The lysotracker panel shows endosome or lysosome; the Hoescht panel shows the cell nucleus. The merged panel shows that the DNA nanostructures surrounds the nucleus after cellular uptake. Scale bar equals 25 microns.

[0252] FIGS. 11A and 11B show DNA nanostructures loading capacity and stability characterization. In particular, FIG. 11A shows fluorimeter analysis of the relationship between relative fluorescence intensity and the number of DNA on each DNA nanostructure.

[0253] FIG. 11B is a gel electrophoresis-based nuclease resistance study of 104 6-disulfide modified DNA nanostructure in HeLa complete medium (with 10% FBS) at 37° C. with varied incubation times.

[0254] FIG. 12A and FIG. 12B show characterization results of representative tubular-shaped DNA nanodevices of this disclosure. FIG. 12A is an Agarose gel electrophoresis image of DNA nanotube with 85 shRNA capture strands and 104 disulfide modified DNA capture strands (left), DNA nanotube loaded with 85 Mcl-1 shRNA (middle) and DNA nanotube loaded with 85 Mcl-1 shRNA plus 104 disulfide modified DNA (right). FIG. 12B shows representative AFM images of structure (left) and (right). Scale bar, 200 nm.

[0255] FIGS. 13A and 13B show experiments indicating that disulfide modification increases the protein inhibition effect of shRNA loaded on DNA nanostructures. In particular FIG. 13A is an Agarose gel electrophoresis image of DNA nanostructures (DON) with different modifications. FIG. 13B is a western blot (WB) analysis of Mcl-1 protein expression in HeLa cells for 48h. Both open DNA nanostructures with and without disulfide modification are loaded with 85 Mcl-1 shRNA.

[0256] FIGS. 14A-14C show an overview of RNA transcription. FIG. 14A depicts a schematic of T7 polymerase transcription. FIG. 14B is a gel image showing that double stranded PCR products can be made by using the designed T7/T7 term primer of this disclosure. FIG. 14C is a gel image showing that transcription of RNA occurs by a unique yield yield T7 polymerase.

[0257] FIGS. 15A-15D show an overview of RNA-protein translation in vitro. FIG. 15A is a schematic of internation Ribosome entry site (IRES) mediated protein expression. FIG. 15B is a black/white photograph of UV-irradiated green fluorescent protein (GFP) produced by the methods described herein. FIG. 15C shows the GFP fluorophore value was measured by a fluorophore plate reader and found to be significantly higher in expression when the IRES promotor (“P”) sequence was used to express the GFP. FIG. 15D shows the GFP protein expression levels are validated by SDS-PAGE gel.

[0258] FIGS. 16A and 16B show the characterization of representative lipid nanoparticles (LNP) of this disclosure. FIG. 16A shows TEM images and sizing information. FIG. 16B shows nanoparticle tracking analysis (NTA) of three separate batches of LNPs, showing the mean size of formed LPNs was consistently about 100 nm.

[0259] FIG. 17 shows the concept of using nanostructured mRNA with the use of staple strands to protect against RNA degradation resulting in higher translation levels in the expressed protein.

[0260] FIG. 18 shows the design of one embodiment of nanostructured RNA (“Pro-mRNA”) where more stable mRNA results in a higher amount of mRNA presented to the cell, thereby increasing the efficiency of translation for mRNA. The mRNA molecule is designed with three fragments: an internal ribosome entry site (IRES) for the cap-free translation initiation, an open reading frame for the translation of the target protein, (e.g. green fluorescence protein (GFP)), and a 3′ polyA tail for mRNA stability. The mRNA strand and 31 short DNA staple strands are designed into a rectangular-shape origami by Cadnano, with 11 bp as the helix pitch.

[0261] FIG. 19 are confocal images demonstrating the folded mRNA (mRNA pOG, origami) can be translated into GFP in the cell. The control is the same treatment without any mRNA or mRNAOG.

[0262] FIG. 20A is an agarose gel electrophoresis image showing that the nanostructured mRNA (Pro-mRNA, or mRNA OG) is formed with staple strands and has a molecular weight higher than mRNA alone or the staple strands alone.

[0263] FIG. 20B is a TEM image showing that the nanostructured mRNA (Pro-mRNA, or mRNA OG) forms structured nanosheets. Not shown is a TEM of mRNA without staple strands which does not form nanosheets.

[0264] FIG. 20C shows the stability of nanostructured mRNA (Pro-mRNA, or mRNA OG) over time, compared to mRNA without staple strands which exhibit significant degradation.

### DETAILED DESCRIPTION

[0265] The entire document is intended to be related as a unified disclosure, and it should be understood that all combinations of features described herein are contemplated, even if the combination of features are not found together in the same sentence, or paragraph, or section of this document. The present disclosure as illustratively described in the following may suitably be practiced in the absence of any element or elements, limitation or limitations, not specifically disclosed herein.

### Certain Definitions

[0266] Unless defined otherwise, all technical and scientific terms used herein have the same meaning as commonly understood by one of ordinary skill in the art to which this disclosure is related. For example, the Concise Dictionary of Biomedicine and Molecular Biology, Juo, Pei-Show, 2nd ed., 2002, CRC Press; The Dictionary of Cell and Molecular Biology, 3rd ed., 1999, Academic Press; and the Oxford Dictionary Of Biochemistry And Molecular Biology, Revised, 2000, Oxford University Press, provide one of skill with a general dictionary of many of the terms used in this disclosure.

[0267] Units, prefixes, and symbols are denoted in their System International de Unites (SI) accepted form. Numeric ranges are inclusive of the numbers defining the range. The headings provided herein are not limitations of the various aspects of the disclosure, which can be had by reference to the specification as a whole. Accordingly, the terms defined immediately below are more fully defined by reference to the specification in its entirety. As used herein, the term “about” means±10%.

[0268] As used herein, the term “administering” refers to the physical introduction of an agent to a subject, using any of the various methods and delivery systems known to those skilled in the art. Exemplary routes of administration for the formulations disclosed herein include intravenous, intramuscular, subcutaneous, intraperitoneal, spinal or other parenteral routes of administration, for example by injection or infusion. The phrase “parenteral administration” as used herein means modes of administration other than enteral and topical administration, usually by injection, and includes, without limitation, intravenous, intramuscular, intraarterial, intrathecal, intralymphatic, intralesional, intracapsular, intraorbital, intracardiac, intradermal, intraperitoneal, transtracheal, subcutaneous, subcuticular, intraarticular, subcapsular, subarachnoid, intraspinal, epidural and intrasternal injection and infusion, as well as in vivo electroporation. In some embodiments, the formulation is administered via a non-parenteral route, e.g., orally. Other non-parenteral routes include a topical, epidermal or mucosal route of administration, for example, intranasally, vaginally, rectally, sublingually or topically. Administering can also be performed, for example, once, a plurality of times, and/or over one or more extended periods.

[0269] As used herein, the term “epitope” is defined as the part(s) of an antigen molecule which contact the antigen binding site of an antibody or a T cell receptor.

[0270] As used herein, the term “operably linked” or “operably connected” refers to the association two chemical moieties so that the function of one is affected by the other, e.g., an arrangement of elements wherein the components so described are configured so as to perform their usual function.

[0271] The term “nucleic acid” refers to deoxyribonucleotides or ribonucleotides and polymers thereof in either single- or double-stranded form, made of monomers (nucleotides) containing a sugar, phosphate and a base that is either a purine or pyrimidine. Unless specifically limited, the term encompasses nucleic acids containing synthetic analogs of natural nucleotides that have similar binding properties as the reference nucleic acid and are metabolized in a manner similar to naturally occurring nucleotides. Unless otherwise indicated, a particular nucleic acid sequence also encompasses conservatively modified variants thereof (e.g., degenerate codon substitutions) and complementary sequences, and the sequence explicitly indicated. Specifically, degenerate codon substitutions may be achieved by generating sequences in which the third position of one or more selected (or all) codons is substituted with mixed-base and/or deoxyinosine residues.

[0272] In some embodiments, the nucleotide can be a noncanonical base. The noncanonical base can be selected from 1-methylpseudouridine, pseudouridine, m5C, m5U, m6A, s2U, and 2′-O-methyl-U. In some embodiments, the noncanonical base can be substituted for uridine to modify the mRNA immunogenicity. In some embodiments, the modified nucleoside is at least one of 1-methyl-pseudouridine and m5C. In some embodiments, the modified nucleoside is at least one of pseudouridine and m5C. In some embodiments, the noncanonical base can be a base described in U.S. Pat. Nos. 11,060,107; 8,748,089; 9,012,219; 11,141,478; 9,181,319; and U.S. Patent Application Publication No. US20190225644; each of which is herein incorporated by reference.

[0273] The term “enhancer” as used herein refers to a sequence which can increase ethe translation efficiency (and thus yield) of an mRNA sequence into a protein. In some embodiments, the enhancer sequence is the Internal Ribosome Entry site (SEQ ID NO: 18). In some embodiments, the enhancer sequence can be one found in U.S. Patent No. U.S. Pat. No. 4,670,388, US U.S. Pat. No. 8,785,611, U.S. Patent Application Publication No. US20180171340, or Pfeiffer, B. et al. PNAS, April 9, (2012) 109 (17) 6626-6631, herein incorporated by reference. In some embodiments, the messenger RNA with an enhancer sequence exhibits enhanced ability to be translated by a target cell than a messenger RNA with the same sequence. In some embodiments, the messenger RNA with enhancer exhibits enhanced ability to be translated when delivered to a mammal than an unpurified preparation of messenger RNA with the same sequence.

[0274] The terms “nucleotide sequence”, “polynucleic acid”, or “nucleic acid sequence” refer to a sequence of bases (purines and/or pyrimidines) in a polymer of DNA or RNA, which can be single-stranded or double-stranded, optionally containing synthetic, non-natural or altered nucleotide bases capable of incorporation into DNA or RNA polymers, and/or backbone modifications (e.g., a modified oligomer, such as a morpholino oligomer, phosphorodiamate morpholino oligomer or vivo-mopholino). The terms “oligo”, “oligonucleotide” and “oligomer” may be used interchangeably and refer to such sequences of purines and/or pyrimidines. The terms “modified oligos”, “modified oligonucleotides”, “modified oligomers”, “modified ribonucleosides” or “modified ribonucleotides” may be similarly used interchangeably, and refer to such sequences that contain synthetic, non-natural or altered bases and/or backbone modifications. In some embodiments, the modified oligos can comprise chemical modifications to the internucleotide phosphate linkages and/or to the backbone sugar.

[0275] Modified nucleic acids (e.g., staple strands chemically connected or conjugated to a targeting molecule) need not be uniformly modified along the entire length of the molecule. Different nucleotide modifications and/or backbone structures may exist at various positions in the nucleic acid. The nucleotide analogs or other modification(s) may be located at any position(s) of a nucleic acid such that the function of the nucleic acid is not substantially decreased. A modification may also be a 5′ or 3′ terminal modification. The nucleic acids may contain at a minimum one and at maximum 100% modified nucleotides, or any intervening percentage, including at least 50% modified nucleotides, at least 80% modified nucleotides, or at least 90% modified nucleotides.

[0276] The modified oligonucleotides (RNA and/or DNA) described herein can be synthesized and/or modified by methods well established in the art, including those described in “Current Protocols in Nucleic Acid Chemistry,” Beaucage, S. L. et al. (Edrs.), John Wiley & Sons, Inc., New York, N.Y., USA, which is hereby incorporated herein by reference in its entirety. Transcription methods are described further herein in the Examples.

[0277] In some embodiments, a staple strand is a modified nucleic acid.

[0278] The synthetic modified oligonucleotides described herein include modifications to prevent rapid degradation by endo- and exo-nucleases and to avoid or reduce the cell's innate immune or interferon response to the oligonucleotide. Modifications can include or exclude, for example, (a) end modifications, e.g., 5′ end modifications (phosphorylation dephosphorylation, conjugation, inverted linkages, etc.), 3′ end modifications (conjugation, DNA nucleotides, inverted linkages, etc.), (b) base modifications, e.g., replacement with modified bases, stabilizing bases, destabilizing bases, or bases that base pair with an expanded repertoire of partners, or conjugated bases, (c) sugar modifications (e.g., at the 2′ position or 4′ position) or replacement of the sugar, as well as (d) internucleoside linkage modifications, including modification or replacement of the phosphodiester linkages.

[0279] Modified nucleotides can include or exclude: alkylated purines and/or pyrimidines; acylated purines and/or pyrimidines; or other heterocycles. These classes of pyrimidines and purines can include or exclude: pseudoisocytosine; N4, N4-ethanocytosine; 8-hydroxy-N6-methyladenine; 4-acetylcytosine, 5-(carboxyhydroxylmethyl) uracil; 5-fluorouracil; 5-bromouracil; 5-carboxymethylaminomethyl-2-thiouracil; 5-carboxymethylaminomethyl uracil; dihydrouracil; inosine; N6-isopentyl-adenine; 1-methyladenine; 1-methylpseudouracil; 1-methylguanine; 2,2-dimethylguanine; 2-methyladenine; 2-methylguanine; 3-methylcytosine; 5-methylcytosine; N6-methyladenine; 7-methylguanine; 5-methylaminomethyl uracil; 5-methoxy amino methyl-2-thiouracil; β-D-mannosylqueosine; 5-methoxycarbonylmethyluracil; 5-methoxyuracil; 2-methylthio-N6-isopentenyladenine; uracil-5-oxyacetic acid methyl ester; psueouracil; 2-thiocytosine; 5-methyl-2 thiouracil, 2-thiouracil; 4-thiouracil; 5-methyluracil; N-uracil-5-oxyacetic acid methylester; uracil 5-oxyacetic acid; queosine; 2-thiocytosine; 5-propyluracil; 5-propylcytosine; 5-ethyluracil; 5-ethylcytosine; 5-butyluracil; 5-pentyluracil; 5-pentylcytosine; and 2,6,-diaminopurine; methylpsuedouracil; 1-methylguanine; 1-methylcytosine. Backbone modifications are can include or exclude: chemical modifications to the phosphate linkage (e.g., phosphorodiamidate, phosphorothioate (PS), N3′phosphoramidate (NP), boranophosphate, 2′,5′phosphodiester, amide-linked, phosphonoacetate (PACE), morpholino, peptide nucleic acid (PNA) and inverted linkages (5′-5′ and 3′-3′ linkages)) and sugar modifications (e.g., 2′-O-Me, UNA, LNA).

[0280] The oligonucleotides described herein may be synthesized using standard solid or solution phase synthesis methods. In certain embodiments, the oligonucleotides are synthesized using solid-phase phosphoramidite chemistry (U.S. Pat. No. 6,773,885) with automated synthesizers. Chemical synthesis of nucleic acids allows for the production of various forms of the nucleic acids with modified linkages, chimeric compositions, and nonstandard bases or modifying groups attached in chosen places through the nucleic acid's entire length.

[0281] As used herein, when describing two polynucleotides (also referred to as “polynucleotide sequence”) as “operably linked”, a single-stranded or double-stranded nucleic acid moiety comprises the two polynucleotides arranged within the nucleic acid moiety in such a manner that at least one of the two polynucleotides is able to exert a physiological effect by which it is characterized upon the other. In some embodiments, a promoter polynucleotide sequence operably linked to the coding region of a gene promotes transcription of the coding region.

[0282] As used herein, when describing an oligonucleotide as “connected” to another moiety, the oligonucleotide is covalently bound to said moiety. The covalent bond is formed using a linker molecule (e.g., sulfo-SMCC (ThermoFisher), where the oligonucleotide is 5′ or 3′ modified with the appropriate functional group (amino, sulfuryl, carboxyl, aldehyde, etc.-all available from Glen Research Inc.) to bind to the linker. The moiety can likewise be functionalized, or possess an innate functional group (e.g., amino group from a lysine amino acid in a protein) to react to said linker group.

[0283] When the nucleic acid encoding the desired protein further comprises a promoter/regulatory sequence, the promoter/regulatory is positioned at the 5′ end of the desired protein coding sequence such that it drives expression of the desired protein in a cell.

[0284] Conventional notation is used herein to describe polynucleotide sequences: the left-hand end of a single-stranded polynucleotide sequence is the 5′-end; the left-hand direction of a double-stranded polynucleotide sequence is referred to as the 5′-direction.

[0285] The direction of 5′ to 3′ addition of nucleotides to nascent RNA transcripts is referred to as the transcription direction. The DNA strand having the same sequence as an mRNA is referred to as the “coding strand”.

[0286] As used herein, the term “promoter sequence” refers to a nucleic acid sequence which is required for expression of a gene product operably linked to the promoter/regulatory sequence. In some embodiments, this conjoined sequence may be the core promoter sequence. In other embodiments, this conjoined sequence may also comprise an enhancer sequence and other regulatory elements which are required for expression of the gene product. In some embodiments, the promoter/regulatory sequence may be one which expresses the gene product in a tissue specific manner.

[0287] Certain embodiments of the invention encompass isolated or substantially purified nucleic acid compositions. In the context of the present invention, an “isolated” or “purified” DNA molecule or RNA molecule is a DNA molecule or RNA molecule that exists apart from its native environment and is therefore not a product of nature. An isolated DNA molecule or RNA molecule may exist in a purified form or may exist in a non-native environment such as, for example, a transgenic host cell. For example, an “isolated” or “purified” nucleic acid molecule is substantially free of other cellular material or culture medium when produced by recombinant techniques, or substantially free of chemical precursors or other chemicals when chemically synthesized. In one embodiment, an “isolated” nucleic acid is free of sequences that naturally flank the nucleic acid (i.e., sequences located at the 5′ and 3′ ends of the nucleic acid) in the genomic DNA of the organism from which the nucleic acid is derived.

[0288] By “portion” or “fragment,” as it relates to a nucleic acid molecule, sequence or segment of the invention, when it is linked to other sequences for expression, is meant a sequence having at least 80 nucleotides, at least 150 nucleotides, or at least 400 nucleotides. If not employed for expressing, a “portion” or “fragment” means at least 9, at least 12, at least 15, or at least 20, consecutive nucleotides, e.g., probes and primers (oligonucleotides), corresponding to the nucleotide sequence of the nucleic acid molecules of the invention.

[0289] As used herein, the term “recombinant” refers to a combination of DNA or RNA sequences that are joined together using recombinant DNA or RNA technology and procedures used to join together DNA or RNA sequences as described, for example, in Sambrook and Russell, Molecular Cloning: A Laboratory Manual, Cold Spring Harbor, NY: Cold Spring Harbor Laboratory Press (3rd edition, 2001). In some embodiments, recombinant nucleic acids are the the product of various combinations of cloning, restriction, polymerase chain reaction (PCR) and/or ligation steps resulting in a construct having a structural coding or non-coding sequence distinguishable from endogenous nucleic acids found in natural systems. DNA sequences encoding polypeptides can be assembled from cDNA fragments or from a series of synthetic oligonucleotides to provide a synthetic nucleic acid which is capable of being expressed from a recombinant transcriptional unit contained in a cell or in a cell-free transcription and translation system. Genomic DNA comprising the relevant sequences can also be used in the formation of a recombinant gene or transcriptional unit. Sequences of non-translated DNA may be present 5′ or 3′ from the open reading frame, where such sequences do not interfere with manipulation or expression of the coding regions and may act to modulate production of a desired product by various mechanisms. Alternatively, DNA sequences encoding RNA that is not translated may also be considered recombinant. Recombination may also be achieved by either chemical synthesis means, or by the artificial manipulation of isolated segments of nucleic acids, e.g., by genetic engineering techniques.

[0290] “Homology” refers to the percent identity between two polynucleotides or two polypeptide sequences. Two DNA or polypeptide sequences are “homologous” to each other when the sequences exhibit at least about 75% to 85% (including 75%, 76%, 77%, 78%, 79%, 80%, 81%, 82%, 83%, 84%, and 85%), at least about 90%, or at least about 95% to 99% (including 95%, 96%, 97%, 98%, 99%) contiguous sequence identity over a defined length of the sequences.

[0291] As described herein, RNA nanostructures comprising at least one ssRNA molecule (e.g., one or more oligonucleotides/polynucleotides) may be prepared using methods described herein, as well as, with respect to certain embodiments, using techniques known in the art. The assembly of such RNA nanostructures may be based on base-pairing principles or other non-canonical binding interactions. For example, while no specific RNA sequence is required, regions of complementary within a single RNA molecule or between multiple RNA molecules may be used for assembly. Persons of ordinary skill in the art will readily understand and appreciate that the optimal sequence for any given RNA nanostructure will depend on the desired or intended shape, size, nucleic acid content, and intended use of such RNA structure. In certain embodiments, wherein the nanostructure comprises more than one ssRNA molecule (e.g. two or more oligonucleotides/polynucleotides), each ssRNA molecule may have a region that is complementary to a region on another ssRNA molecule to enable hybridization of the strands and assembly of the nanostructure. In certain other embodiments, wherein the nanostructure consists of a single ssRNA molecule (i.e., a single unimolecular RNA oligonucleotide/polynucleotide), regions within the molecule may be complementary to certain other regions within the molecule to enable hybridization and assembly of the nanostructure.

[0292] RNA nanostructures produced in accordance with the present disclosure are typically nanometer-scale structures (e.g., having length scale of 1 to 1000 nanometers), although, in some instances, the term “nanostructure” herein may refer to micrometer-scale structures (e.g., assembled from more than one nanometer-scale or micrometer-scale structure). In some embodiments, a RNA nanostructure described herein has a length scale of 1 to 1000 nm, 1 to 900 nm, 1 to 800 nm, 1 to 700 nm, 1 to 600 nm, 1 to 500 nm, 1 to 400 nm, 1 to 300 nm, 1 to 200 nm, 1 to 100 nm or 1 to 50 nm. In some embodiments, a RNA nanostructure described herein has a length scale of greater than 1000 nm. In some embodiments, a RNA nanostructure described herein has a length scale of 1 micrometer to 2 micrometers.

[0293] In certain embodiments, the RNA nanostructure comprises, consists essentially of, or consists of multiple ssRNA molecules (e.g., more than one oligonucleotide/polynucleotide strands, such as two or more ssRNA molecules). In certain embodiments, the RNA nanostructure comprises two or more ssRNA molecules, which are capable of self-assembling (or configured to self-assemble) into a nanostructure. In certain embodiments, the RNA nanostructure is assembled from two or more ssRNA molecules through paranemic cohesion crossovers. Thus, in certain embodiments, the RNA nanostructure comprises two or more ssRNA molecules, wherein the ssRNA molecules self-assemble to form at least one paranemic cohesion crossover.

[0294] In certain embodiments, the RNA nanostructure comprises, consists essentially of, or consists of a single ssRNA molecule (i.e., one unimolecular oligonucleotide/polynucleotide strand). In certain embodiments, the RNA nanostructure is assembled using one ssRNA molecule (e.g., in certain embodiments one and only one, exactly one, or greater than zero and less than two). In certain embodiments, the RNA nanostructure is comprised of one ssRNA molecule, which is capable of self-assembling into a nanostructure. In certain embodiments, the RNA nanostructure consists of one ssRNA molecule, which is capable of self-assembling into a nanostructure. In certain embodiments, the RNA nanostructure is assembled from one ssRNA molecule through paranemic cohesion crossovers. Thus, in certain embodiments, the RNA nanostructure comprises one single-stranded RNA (ssRNA) molecule, wherein the ssRNA molecule forms at least one paranemic cohesion crossover.

[0295] The length of each RNA strand within an RNA nanostructure is variable and depends on, for example, the type, size, geometric, and/or intended use of nanostructure to be formed. It is to be understood, that if a particular RNA nanostructure comprises more than one ssRNA molecule, the length of each RNA molecule can be selected independently of one another. In certain embodiments, the at least one ssRNA molecule (i.e., oligonucleotide or RNA strand) is about 10 nucleotides in length to about 200,000 nucleotides in length, the at least one ssRNA molecule (i.e., oligonucleotide or RNA strand) is about 10 nucleotides in length to about 100,000 nucleotides in length, the at least one ssRNA molecule (i.e., oligonucleotide or RNA strand) is about 10 nucleotides in length to about 90,000 nucleotides in length, about 10 to about 80,000 nucleotides in length, about 10 to about 70,000 nucleotides in length, about 10 to about 60,000 nucleotides in length, about 10 to about 50,000 nucleotides in length, about 10 to about 40,000 nucleotides in length, about 10 to about 30,000 nucleotides in length, about 10 to about 25,000 nucleotides in length, or about 10 to about 20,000 nucleotides in length. In certain embodiments, the at least one ssRNA molecule (i.e., oligonucleotide or RNA strand) is about 15 nucleotides in length to about 20,000 nucleotides in length, the ssRNA molecule (i.e., oligonucleotide or RNA strand) is about 15 nucleotides in length to about 10,000 nucleotides in length, about 15 to about 7500 nucleotides in length, about 3000 to about 7000 nucleotides in length, about 5000 to about 7000 nucleotides in length, about 1500 to about 6500 nucleotides in length, about 1000 to about 7000 nucleotides in length, about 5500 to about 6500 nucleotides in length, about 15 to about 5000 nucleotides in length, about 15 to about 4000 nucleotides in length, about 15 to about 3000 nucleotides in length, about 250 to about 3000 nucleotides in length, about 500 to about 3000 nucleotides in length, about 1000 to about 3000 nucleotides in length, or about 1500 to about 2500 nucleotides in length. In certain embodiments, the ssRNA molecule (i.e., oligonucleotide or RNA strand) is about 100, about 200, about 300, about 400, about 500, about 600, about 700, about 800, about 900, about 1000, about 1100, about 1200, about 1300, about 1400, about 1500, about 1600, about 1700, about 1800, about 1900, about 2000, about 2100, about 2200, about 2300, about 2400, about 2500, about 2600, about 2700, about 2800, about 2900, about 3000, about 3100, about 3200, about 3300, about 3400, about 3500, about 3600, about 3700, about 3800, about 3900, about 4000, about 4100, about 4200, about 4300, about 4400, about 4500, about 4600, about 4700, about 4800, about 4900, about 5000, about 5100, about 5200, about 5300, about 5400, about 5500, about 5600, about 5700, about 5800, about 5900, about 6000, about 6100, about 6200, about 6300, about 6400, about 6500, about 6600, about 6700, about 6800, about 6900, about 7000, about 7100, about 7200, about 7300, about 7400, about 7500, about 7600, about 7700, about 7800, about 7900, about 8000, about 8100, about 8200, about 8300, about 8400, about 8500, about 8600, about 8700, about 8800, about 8900, about 9000, about 9100, about 9200, about 9300, about 9400, about 9500, about 9600, about 9700, about 9800, about 9900, about 10000, about 10100, about 10200. about 10300, about 10400, about 10500, about 10600, about 10700, about 10800, about 10900, about 11000, about 11000, about 11100, about 11200, about 11300, about 11400, about 11500, about 11600, about 11700, about 11800, about 11900, about 12000, about 12100, about 12200, about 12300, about 12400, about 12500, about 12600, about 12700, about 12800, about 12900 nucleotides in length, about 13000 nucleotides in length, about 14000 nucleotides in length, about 15000 nucleotides in length, about 16000 nucleotides in length, about 17000 nucleotides in length, about 18000 nucleotides in length, about 19000 nucleotides in length, about 20000 nucleotides in length, about 25000 nucleotides in length, about 30000 nucleotides in length, about 35000 nucleotides in length, about 40000 nucleotides in length, about 45000 nucleotides in length, about 50000 nucleotides in length, about 75000 nucleotides in length, about 100000 nucleotides in length, about 125000 nucleotides in length, about 150000 nucleotides in length, about 175000 nucleotides in length or about 200000 nucleotides in length.

[0296] In certain embodiments, an ssRNA molecule used in an RNA nanostructure described herein is synthesized de novo using any number of procedures well known in the art. For example, the cyanoethyl phosphoramidite method (Beaucage, S. L., and Caruthers, M. H., Tet. Let. 22:1859,1981) or the nucleoside H-phosphonate method (Garegg et al., Tet. Let. 27:4051-4054, 1986; Froehler et al., Nucl. Acid. Res. 14:5399-5407, 1986; Garegg et al., Tet. Let. 27:4055-4058, 1986, Gaffney et al., Tet. Let. 29:2619-2622,1988). These chemistries can be performed by a variety of automated oligonucleotide synthesizers available in the market, including the use of an in vitro transcription method.

[0297] An ssRNA molecule used in an RNA nanostructure described herein may comprise one or more modifications. Such modifications include, but are not limited to, base modifications, sugar modifications, and backbone modifications. The ssRNA molecule may contain natural or synthetic nucleotides (e.g., modified nucleotides). For example, in certain embodiments, the ssRNA nanostructure comprises one or more modified nucleotides (e.g., one or more inosine residues). ssRNA molecules described herein may have a homogenous backbone (e.g., entirely phosphodiester or entirely phosphorothioate) or a heterogeneous (or chimeric) backbone.

[0298] Modified nucleotides are known in the art and include, by example and not by way of limitation, alkylated purines and/or pyrimidines; acylated purines and/or pyrimidines; or other heterocycles. These classes of pyrimidines and purines are known in the art and include, pseudoisocytosine; N4, N4-ethanocytosine; 8-hydroxy-N6-methyladenine; 4-acetylcytosine, 5-(carboxyhydroxylmethyl) uracil; 5-fluorouracil; 5-bromouracil; 5-carboxymethylaminomethyl-2-thiouracil; 5-carboxymethylaminomethyl uracil; dihydrouracil; inosine; N6-isopentyl-adenine; 1-methyladenine; 1-methylpseudouracil; 1-methylguanine; 2,2-dimethylguanine; 2-methyladenine; 2-methylguanine; 3-methylcytosine; 5-methylcytosine; N6-methyladenine; 7-methylguanine; 5-methylaminomethyl uracil; 5-methoxy amino methyl-2-thiouracil; β-D-mannosylqueosine; 5-methoxycarbonylmethyluracil; 5-methoxyuracil; 2-methylthio-N6-isopentenyladenine; uracil-5-oxyacetic acid methyl ester; psueouracil; 2-thiocytosine; 5-methyl-2 thiouracil, 2-thiouracil; 4-thiouracil; 5-methyluracil; N-uracil-5-oxyacetic acid methylester; uracil 5-oxyacetic acid; queosine; 2-thiocytosine; 5-propyluracil; 5-propylcytosine; 5-ethyluracil; 5-ethylcytosine; 5-butyluracil; 5-pentyluracil; 5-pentylcytosine; and 2,6,-diaminopurine; methylpsuedouracil; 1-methylguanine; 1-methylcytosine. Backbone modifications are similarly known in the art, and include, chemical modifications to the phosphate linkage (e.g., phosphorodiamidate, phosphorothioate (PS), N3′phosphoramidate (NP), boranophosphate, 2′,5′phosphodiester, amide-linked, phosphonoacetate (PACE), morpholino, peptide nucleic acid (PNA) and inverted linkages (5′-5′ and 3′-3′ linkages)) and sugar modifications (e.g., 2′-O-Me, UNA, LNA).

[0299] In certain embodiments, the at least one ssRNA molecule does not comprise a transcription termination sequence (e.g., in the middle of the strand). In certain embodiments, the at least one ssRNA molecule does not comprise an AUCUGUU sequence.

[0300] In certain embodiments, an RNA nanostructure described herein has knotting simplicity. In the field of nucleic acid topology, “knotting” refers to nucleic acid that is intertwined many times and tied into knots (see, e.g., Buck D, Proceedings of Symposia in Applied Mathematics 2009; 66:1-33; Rybenkov V V et al. Proc Natl Acad Sci USA. 1993; 90 (11): 5307-5311). Knotting simplicity enables the RNA molecule(s) to avoid being kinetically trapped during the folding process, which can prevent proper folding into a user-defined target shape. Thus, in some embodiments, the crossing number of the nanostructure is zero and the nanostructure is unknotted. A crossing number is a knot invariant that shows the smallest number of crossings in any diagram of the knot, representing the topological complexity of a knot.

[0301] As used herein, the term “antibody” (Ab) includes, without limitation, a glycoprotein immunoglobulin which binds specifically to an antigen. In general, and antibody can comprise at least two heavy (H) chains and two light (L) chains interconnected by disulfide bonds, or an antigen-binding portion thereof. Each H chain comprises a heavy chain variable region (abbreviated herein as VH) and a heavy chain constant region. The heavy chain constant region comprises three constant domains, CH1, CH2 and CH3. Each light chain comprises a light chain variable region (abbreviated herein as VL) and a light chain constant region. The light chain constant region comprises one constant domain, CL. The VH and VL regions are further subdivided into regions of hypervariability, termed complementarity determining regions (CDRs), interspersed with regions that are more conserved, termed framework regions (FR). Each VH and VL comprises three CDRs and four FRs, arranged from amino-terminus to carboxy-terminus in the following order: FR1, CDR1, FR2, CDR2, FR3, CDR3, FR4. The variable regions of the heavy and light chains contain a binding domain that interacts with an antigen. The constant regions of the Abs may mediate the binding of the immunoglobulin to host tissues or factors, including various cells of the immune system (e.g., effector cells) and the first component (C1q) of the classical complement system. An immunoglobulin may derive from any of the commonly known isotypes, including but not limited to IgA, secretory IgA, IgG and IgM. IgG subclasses are also well known to those in the art and include but are not limited to human IgG1, IgG2, IgG3 and IgG4. “Isotype” refers to the Ab class or subclass (e.g., IgM or IgG1) that is encoded by the heavy chain constant region genes. The term “antibody” can include or exclude both naturally occurring and non-naturally occurring Abs; monoclonal and polyclonal Abs; chimeric and humanized Abs; human or nonhuman Abs; wholly synthetic Abs; and single chain Abs. A nonhuman Ab may be humanized by recombinant methods to reduce its immunogenicity in man. The term “antibody” also includes an antigen-binding fragment or an antigen-binding portion of any of the aforementioned immunoglobulins, and includes a monovalent and a divalent fragment or portion, and a single chain Ab.

[0302] “Antibody fragments” “nanobody fragments” or “sybody fragments” comprise only a portion of an intact antibody, nanobody or sybody, where the fragment retains at least one, and as many as most or all, of the functions normally associated with that fragment when present in an intact antibody, nanobody or sybody. In one embodiment, an antibody, nanobody or sybody fragment comprises an antigen binding site of the intact antibody, nanobody or sybody and thus retains the ability to bind antigen. In one embodiment, an antibody, nanobody, or sybody fragment is a monovalent antibody that has an in vivo half life substantially similar to an intact antibody.

[0303] As used herein, the term “affibody” refers to a small protein which specifically binds to a target with high affinity (Frejd et al., Experimental & Molecular Medicine volume 49, page e306 (2017)). Affibodies comprise alpha-helices and lack a bridging disulfide moiety. Affibodies of this disclosure can be purchased from Abcamm or made by protein expression methods well known in the art. In some embodiments, the affibody is ABY-025, which binds selectively to HER2 receptors with picomolar affinity.

[0304] Identity or homology with respect to a specified amino acid sequence of this invention is defined herein as the percentage of amino acid residues in a candidate sequence that are identical with the specified residues, after aligning the sequences and introducing gaps, if necessary, to achieve the maximum percent homology, and not considering any conservative substitutions as part of the sequence identity. None of N-terminal, C-terminal or internal extensions, deletions, or insertions into the specified sequence shall be construed as affecting homology. All sequence alignments called for in this invention are such maximal homology alignments. Generally, the nucleic acid sequence homology between the polynucleotides, oligonucleotides, and fragments of the invention and a nucleic acid sequence of interest will be at least 80%>, and more typically with preferably increasing homologies of at least 85%, 90%, 91%, 92%, 92%, 94%, 95%, 96%, 97%, 98%, 99%, and/or 100%. Two amino acid sequences are homologous if there is a partial or complete identity between their sequences.

[0305] In some embodiments, the practice of the present disclosure will employ, unless otherwise indicated molecular biology, microbiology, recombinant DNA, and immunology techniques within the skill of the art. Such techniques include techniques set forth in, for example, Molecular Cloning A Laboratory Manual, 2nd Ed., ed. by Sambrook, Fritsch and Maniatis (Cold Spring Harbor Laboratory Press, 1989); DNA Cloning, Volumes I and II (D. N. Glover ed., 1985); Culture Of Animal Cells (R. I. Freshney, Alan R. Liss, Inc., 1987); Immobilized Cells And Enzymes (IRL Press, 1986); B. Perbal, A Practical Guide To Molecular Cloning (1984); the treatise, Methods In Enzymology (Academic Press, Inc., N.Y.); Gene Transfer Vectors For Mammalian Cells (J. H. Miller and M. P. Calos eds., 1987, Cold Spring Harbor Laboratory); Methods In Enzymology, Vols. 154 and 155 (Wu et al. eds.), Immunochemical Methods In Cell And Molecular Biology (Mayer and Walker, eds., Academic Press, London, 1987); Antibodies: A Laboratory Manual, by Harlow and Lane s (Cold Spring Harbor Laboratory Press, 1988); and Handbook Of Experimental Immunology, Volumes I-IV (D. M. Weir and C. C. Blackwell, eds., 1986).

[0306] The following terms are used to describe the sequence relationships between two or more nucleotide sequences: “reference sequence,” “comparison window,” “sequence identity,” “percentage of sequence identity,” “substantial identity,” and “complementarity”. As used herein, “reference sequence” is a defined sequence used as a basis for sequence comparison. A reference sequence may be a subset or the entirety of a specified sequence; for example, as a segment of a full-length cDNA or gene sequence, or the complete cDNA or gene sequence.

[0307] As used herein, “comparison window” makes reference to a contiguous and specified segment of a polynucleotide sequence, wherein the polynucleotide sequence in the comparison window may comprise additions or deletions (i.e., gaps) compared to the reference sequence (which does not comprise additions or deletions) for optimal alignment of the two sequences. Generally, the comparison window is at least 20 contiguous nucleotides in length, and optionally is 30, 40, 50, 100, or longer. Those of skill in the art understand that to avoid a high similarity to a reference sequence due to inclusion of gaps in the polynucleotide sequence a gap penalty is typically introduced and is subtracted from the number of matches.

[0308] Methods of alignment of sequences for comparison can be performed. Thus, the determination of percent identity, including sequence complementarity, between any two sequences is accomplished using a mathematical algorithm. Non-limiting examples of such mathematical algorithms are the algorithm of Myers and Miller (Myers and Miller, CABIOS, 4, 11 (1988)); the local homology algorithm of Smith et al. (Smith et al., Adv. Appl. Math., 2, 482 (1981)); the homology alignment algorithm of Needleman and Wunsch (Needleman and Wunsch, JMB, 48, 443 (1970)); the search-for-similarity-method of Pearson and Lipman (Pearson and Lipman, Proc. Natl. Acad. Sci. USA, 85, 2444 (1988)); the algorithm of Karlin and Altschul (Karlin and Altschul, Proc. Natl. Acad. Sci. USA, 87, 2264 (1990)), modified as in Karlin and Altschul (Karlin and Altschul, Proc. Natl. Acad. Sci. USA 90, 5873 (1993)).

[0309] Computer implementations of these mathematical algorithms is utilized for comparison of sequences to determine sequence identity or complementarity. Such implementations include, but are not limited to: CLUSTAL in the PC/Gene program (available from Intelligenetics, Mountain View, Calif.); the ALIGN program (Version 2.0) and GAP, BESTFIT, BLAST, FASTA, and TFASTA in the Wisconsin Genetics Software Package, Version 8 (available from Genetics Computer Group (GCG), 575 Science Drive, Madison, Wis., USA). Alignments using these programs is performed using the default parameters. The CLUSTAL program is well described by Higgins et al. (Higgins et al., CABIOS, 5, 151 (1989)); Corpet et al. (Corpet et al., Nucl. Acids Res., 16, 10881 (1988)); Huang et al. (Huang et al., CABIOS, 8, 155 (1992)); and Pearson et al. (Pearson et al., Meth. Mol. Biol., 24, 307 (1994)). The ALIGN program is based on the algorithm of Myers and Miller, supra. The BLAST programs of Altschul et al. (Altschul et al., JMB, 215, 403 (1990)) are based on the algorithm of Karlin and Altschul supra.

[0310] Software for performing BLAST analyses is publicly available through the National Center for Biotechnology Information. This algorithm involves first identifying high scoring sequence pairs (HSPs) by identifying short words of length W in the query sequence, which either match or satisfy some positive-valued threshold score T when aligned with a word of the same length in a database sequence. T is referred to as the neighborhood word score threshold. These initial neighborhood word hits act as seeds for initiating searches to find longer HSPs containing them. The word hits are then extended in both directions along each sequence for as far as the cumulative alignment score is increased. Cumulative scores are calculated using, for nucleotide sequences, the parameters M (reward score for a pair of matching residues; always >0) and N (penalty score for mismatching residues; always <0). For amino acid sequences, a scoring matrix is used to calculate the cumulative score. Extension of the word hits in each direction are halted when the cumulative alignment score falls off by the quantity X from its maximum achieved value, the cumulative score goes to zero or below due to the accumulation of one or more negative-scoring residue alignments, or the end of either sequence is reached.

[0311] In addition to calculating percent sequence identity, the BLAST algorithm also performs a statistical analysis of the similarity between two sequences. One measure of similarity provided by the BLAST algorithm is the smallest sum probability (P (N)), which provides an indication of the probability by which a match between two nucleotide or amino acid sequences would occur by chance. For example, a test nucleic acid sequence is considered similar to a reference sequence if the smallest sum probability in a comparison of the test nucleic acid sequence to the reference nucleic acid sequence is less than about 0.1, less than about 0.01, or even less than about 0.001.

[0312] To obtain gapped alignments for comparison purposes, Gapped BLAST (in BLAST 2.0) is utilized. Alternatively, PSI-BLAST (in BLAST 2.0) is used to perform an iterated search that detects distant relationships between molecules. When utilizing BLAST, Gapped BLAST, PSI-BLAST, the default parameters of the respective programs (e.g., BLASTN for nucleotide sequences, BLASTX for proteins) is used. The BLASTN program (for nucleotide sequences) uses as defaults a wordlength (W) of 11, an expectation (E) of 10, a cutoff of 100, M=5, N=−4, and a comparison of both strands. For amino acid sequences, the BLASTP program uses as defaults a wordlength (W) of 3, an expectation (E) of 10, and the BLOSUM62 scoring matrix. Alignment may also be performed manually by inspection.

[0313] For purposes of the present invention, comparison of nucleotide sequences for determination of percent sequence identity may be made using the BlastN program (version 1.4.7 or later) with its default parameters or any equivalent program. By “equivalent program” is intended any sequence comparison program that, for any two sequences in question, generates an alignment having identical nucleotide or amino acid residue matches and an identical percent sequence identity when compared to the corresponding alignment generated by the program.

[0314] As used herein, the terms “sequence identity” or “identity” in the context of two nucleic acid or polypeptide sequences makes reference to a specified percentage of residues in the two sequences that are the same when aligned for maximum correspondence over a specified comparison window, as measured by sequence comparison algorithms or by visual inspection.

[0315] As used herein, the term, “percentage of sequence identity” means the value determined by comparing two optimally aligned sequences over a comparison window, wherein the portion of the polynucleotide sequence in the comparison window may comprise additions or deletions (i.e., gaps) as compared to the reference sequence (which does not comprise additions or deletions) for optimal alignment of the two sequences. The percentage is calculated by determining the number of positions at which the identical nucleic acid base or amino acid residue occurs in both sequences to yield the number of matched positions, dividing the number of matched positions by the total number of positions in the window of comparison, and multiplying the result by 100 to yield the percentage of sequence identity.

[0316] As used herein, the term “identity” or “substantial identity” of polynucleotide sequences means that a polynucleotide comprises a sequence that has at least 70%, 71%, 72%, 73%, 74%, 75%, 76%, 77%, 78%, 79%, 80%, 81%, 82%, 83%, 84%, 85%, 86%, 87%, 88%, 89%, 90%, 91%, 92%, 93%, or 94%, or even at least 95%, 96%, 97%, 98%, or 99% sequence identity, compared to a reference sequence using one of the alignment programs described using standard parameters.

[0317] For sequence comparison, typically one sequence acts as a reference sequence to which test sequences are compared. When using a sequence comparison algorithm, test and reference sequences are input into a computer, subsequence coordinates are designated if necessary, and sequence algorithm program parameters are designated. The sequence comparison algorithm then calculates the percent sequence identity for the test sequence(s) relative to the reference sequence, based on the designated program parameters.

[0318] Another indication that nucleotide sequences are substantially identical is if two molecules hybridize to each other under stringent conditions. Generally, stringent conditions are selected to be about 5° C. lower than the thermal melting point (Tm) for the specific sequence at a defined ionic strength and pH. However, stringent conditions encompass temperatures in the range of about 1° C. to about 20° C., depending upon the desired degree of stringency as otherwise qualified herein. Nucleic acids that do not hybridize to each other under stringent conditions are still substantially identical if the polypeptides they encode are substantially identical. This may occur, e.g., when a copy of a nucleic acid is created using the maximum codon degeneracy permitted by the genetic code. One indication that two nucleic acid sequences are substantially identical is when the polypeptide encoded by the first nucleic acid is immunologically cross reactive with the polypeptide encoded by the second nucleic acid.

[0319] The phrase “hybridizing specifically to” refers to the binding, duplexing, or hybridizing of a molecule only to a particular nucleotide sequence under stringent conditions when that sequence is present in a complex mixture (e.g., total cellular) DNA or RNA. “Bind(s) substantially” refers to complementary hybridization between a probe nucleic acid and a target nucleic acid and embraces minor mismatches that is accommodated by reducing the stringency of the hybridization media to achieve the desired detection of the target nucleic acid sequence.

[0320] The term “complementary” as used herein refers to the broad concept of complementary base pairing between two nucleic acids aligned in an antisense position in relation to each other. When a nucleotide position in both of the molecules is occupied by nucleotides normally capable of base pairing with each other, then the nucleic acids are considered to be complementary to each other at this position. Thus, two nucleic acids are substantially complementary to each other when at least about 50%, at least about 60%, or at least about 80% of corresponding positions in each of the molecules are occupied by nucleotides which normally base pair with each other (e.g., A: T (A: U for RNA) and G: C nucleotide pairs).

[0321] As used herein, the term “coding region” of a gene consists of the nucleotide residues of the coding strand of the gene and the nucleotides of the non-coding strand of the gene which are homologous with or complementary to, respectively, the coding region of an mRNA molecule which is produced by transcription of the gene.

[0322] As used herein, the term “encoding” refers to the innate property of specific sequences of nucleotides in a polynucleotide, including a gene, a cDNA, or an mRNA, to serve as templates for the synthesis of other biopolymers having either a defined sequence of nucleotides or a defined sequence of amino acids and the biological properties resulting therefrom. Thus, a gene encodes a protein if transcription and translation of mRNA corresponding to that gene produces the protein in a cell or other biological system. Both the coding strand, the nucleotide sequence of which is identical to the mRNA sequence and the non-coding strand, used as the template for transcription of a gene or DNA, can be referred to as encoding the protein or other product of that gene.

[0323] As used herein, the term “derived” or “directed to” with respect to a nucleotide molecule means that the molecule has complementary sequence identity to a particular molecule of interest.

[0324] As used herein, the term “aptamer” refers to a nucleic acid sequence that interacts with a ligand under normal physiological conditions.

[0325] As used herein, the term “lipid nanoparticle” or “LNP” refers to a cell, or model cell, comprising a lipid bilayer. The lipid bilayer can include or exclude a lipid selected from: DOTAP (1,2-dioleoyl-3-trimethylammonium-propane chloride salt), DOPC (1,2-dioleoyl-sn-glycero-3-phosphocholine), cholesteryl hemisuccinate (CHEMS), 1-stearoyl-2-hydroxy-sn-glycero-3-phosphate (sodium salt) (LPA), dioctanoylglycerol pyrophosphate (ammonium salt) (DGPP), 5-(palmitoyloxy) octadecanoic acid (5-PAHSA), 9-(palmitoyloxy) octadecanoic acid (9-PAHSA), 2-hydroxyoleic acid (sodium salt) (2-OHOA), mycolic acid, N-oleoylglycine, N-arachidonoylglycine, N-palmitoylglycine, Galactocerebroside, Gm1 ganglioside, and other cell membrane lipids including those referred to in Alberts et al., Molecular Biology of the Cell. 4th edition, New York: Garland Science; 2002, herein incorporated by reference. In some embodiments, the lipid nanoparticle is a lipid nanoparticle described in U.S. Pat. Nos. 10,799,463, 10485884, 10507249, 10166298, 11337922, 9580711, 9567296, U.S. Patent Application Publication Nos. US20220409536, US20220062175, US20200129445, US20200315967, US20230149310, US20210121411, US20180153822, and US20110038941.

[0326] As used herein, the term “therapeutically effective amount” means an amount of a compound of the present invention that (i) treats the particular disease, condition, or disorder, (ii) attenuates, ameliorates, or eliminates one or more symptoms of the particular disease, condition, or disorder, or (iii) prevents or delays the onset of one or more symptoms of the particular disease, condition, or disorder described herein.

[0327] As used herein, the term “subject” as used herein refers to humans, higher non-human primates, rodents, domestic, cows, horses, pigs, sheep, dogs and cats. In one embodiment, the subject is a human.

[0328] The term “therapeutically effective amount,” in reference to treating a disease state/condition, refers to an amount of a therapeutic agent that is capable of having any detectable, positive effect on any symptom, aspect, or characteristics of a disease state/condition when administered as a single dose or in multiple doses. Such effect need not be absolute to be beneficial.

[0329] As used herein, the terms “treat” and “treatment” refer to both therapeutic treatment and prophylactic or preventative measures, wherein the object is to prevent or decrease an undesired physiological change or disorder. For purposes of this invention, beneficial or desired clinical results include, but are not limited to, alleviation of symptoms, diminishment of extent of disease, stabilized (i.e., not worsening) state of disease, delay or slowing of disease progression, amelioration or palliation of the disease state, and remission (whether partial or total), whether detectable or undetectable. “Treatment” can also mean prolonging survival as compared to expected survival if not receiving treatment. Those in need of treatment include those already with the condition or disorder and those prone to have the condition or disorder or those in which the condition or disorder is to be prevented.

[0330] The terms “inhibiting” or “reducing” or any variation of these terms includes any measurable decrease or complete inhibition to achieve a desired result. The terms “promote” or “increase” or any variation of these terms includes any measurable increase or production of a protein or molecule to achieve a desired result.

[0331] The term “preventing” or any variation of this term means to slow, stop, or reverse progression, in whole or in part, or ameliorate toward a result. The prevention may be any slowing of the progression toward the result.

[0332] As used herein, the term “cancer” refers to a broad group of various diseases characterized by the uncontrolled growth of abnormal cells in the body. Unregulated cell division and growth results in the formation of malignant tumors that invade neighboring tissues and may also metastasize to distant parts of the body through the lymphatic system or bloodstream. In some embodiments, a “cancer” or “cancer tissue” can include a tumor. The types of cancers that are treated by the methods of this disclosure can include or exclude cancers of the immune system including lymphoma, acute lymphoblastoid leukemia, leukemia, and other leukocyte malignancies. In some embodiments, the methods of this disclosure reduce the tumor size of a tumor derived from, for example, bone cancer, pancreatic cancer, breast cancer, brain cancer, lung cancer, skin cancer, cancer of the head or neck, cutaneous or intraocular malignant melanoma, uterine cancer, ovarian cancer, rectal cancer, cancer of the anal region, stomach cancer, testicular cancer, uterine cancer, carcinoma of the fallopian tubes, carcinoma of the endometrium, carcinoma of the cervix, carcinoma of the vagina, carcinoma of the vulva, Hodgkin's Disease, non-Hodgkin's lymphoma (NHL), primary mediastinal large B cell lymphoma (PMBC), diffuse large B cell lymphoma (DLBCL), follicular lymphoma (FL), transformed follicular lymphoma, splenic marginal zone lymphoma (SMZL), cancer of the esophagus, cancer of the small intestine, cancer of the endocrine system, cancer of the thyroid gland, cancer of the parathyroid gland, cancer of the adrenal gland, sarcoma of soft tissue, cancer of the urethra, cancer of the penis, chronic or acute leukemia, acute myeloid leukemia, chronic myeloid leukemia, acute lymphoblastic leukemia (ALL) (including non T cell ALL), chronic lymphocytic leukemia (CLL), solid tumors of childhood, lymphocytic lymphoma, cancer of the bladder, cancer of the kidney or ureter, carcinoma of the renal pelvis, neoplasm of the central nervous system (CNS), primary CNS lymphoma, tumor angiogenesis, spinal axis tumor, brain stem glioma, pituitary adenoma, Kaposi's sarcoma, epidermoid cancer, squamous cell cancer, T-cell lymphoma, and combinations of said cancers. In some embodiments, the cancer is acute lymphoblastoid leukemia.

[0333] As used herein, the term “anti-cancer agent” or “cancer therapeutic agent” refers to an agent which has been identified to elicit a cancer killing response. In some embodiments, the anticancer agent is selected from: a chemotherapeutic agent. In certain embodiments, the chemotherapeutic agent is selected from: Abraxane (chemical name: albumin-bound or nab-paclitaxel), Adriamycin (chemical name: doxorubicin), carboplatin (brand name: Paraplatin), Cytoxan (chemical name: cyclophosphamide), daunorubicin (brand names: Cerubidine, DaunoXome), Doxil (chemical name: doxorubicin), Ellence (chemical name: epirubicin), fluorouracil (also called 5-fluorouracil or 5-FU; brand name: Adrucil), Gemzar (chemical name: gemcitabine), Halaven (chemical name: eribulin), Ixempra (chemical name: ixabepilone), methotrexate (brand names: Amethopterin, Mexate, Folex), Mitomycin (chemical name: mutamycin), mitoxantrone (brand name: Novantrone), Navelbine (chemical name: vinorelbine), Taxol (chemical name: paclitaxel), Taxotere (chemical name: docetaxel), thiotepa (brand name: Thioplex), vincristine (brand names: Oncovin, Vincasar PES, Vincrex), and Xeloda (chemical name: capecitabine). In certain embodiments, the chemotherapeutic agent is selected from: Abraxane (Paclitaxel (with albumin) Injection), Adriamycin (Doxorubicin), Afinitor (Everolimus), Alecensa (Alectinib), Alimta (PEMETREXED), Aliqopa (Copanlisib), Alkeran Injection (Melphalan), Alunbrig (Brigatinib), Aredia (Pamidronate), Arimidex (Anastrozole), Aromasin (Exemestane), Arranon (Nelarabine), Arzerra (Ofatumumab), Avastin (Bevacizumab), Bavencio (Avelumab), Beleodaq (Belinostat), Besponsa (Inotuzumab Ozogamicin), Bexxar (Tositumomab), BiCNU (Carmustine), Blenoxane (Bleomycin), Blincyto (Blinatumomab), Bosulif (Bosutinib), Braftovi (Encorafenib), Busulfex (Busulfan), Cabometyx (Cabozantinib), Calquence (Acalabrutinib), Campath (Alemtuzumab), Camptosar (Irinotecan), Caprelsa (Vandetanib), Casodex (Bicalutamide), CeeNU (Lomustine), CeeNU Dose Pack (Lomustine), Cerubidine (Daunorubicin), Cinqair (Reslizumab), Clolar (Clofarabine), Cometriq (Cabozantinib), Copiktra (Duvelisib), Cosmegen (Dactinomycin), Cotellic (Cobimetinib), Cyramza (Ramucirumab), CytosarU (Cytarabine), Cytoxan (Cytoxan), Cyclophosphamide, Dacogen (Decitabine), Darzalex (Daratumumab), DaunoXome (Daunorubicin Lipid Complex), Daurismo (Glasdegib), Decadron (Dexamethasone), DepoCyt (Cytarabine Lipid Complex), Dexamethasone Intensol (Dexamethasone), Dexpak Taperpak (Dexamethasone), Docefrez (Docetaxel), Doxil (Doxorubicin Lipid Complex), DTIC (Decarbazine), Eligard (Leuprolide), Ellence (Ellence (epirubicin)), Eloxatin (Eloxatin (oxaliplatin)), Elspar (Asparaginase), Emcyt (Estramustine), Emend (Fosaprepitant), Empliciti (Elotzumab), Erbitux (Cetuximab), Erivedge (Vismodegib), Erleada (Apalutamide), Erwinaze (Asparaginase Erwinia chrysanthemi), Ethyol (Amifostine), Etopophos (Etoposide), Eulexin (Flutamide), Fareston (Toremifene), Farydak (Panobinostat), Faslodex (Fulvestrant), Femara (Letrozole), Firmagon (Degarelix), FloPred (Prednisolone), Fludara (Fludarabine), Folex(Methotrexate), Folotyn (Pralatrexate), FUDR (FUDR (floxuridine)), Gazyva (Obinutuzumab), Gemzar (Gemcitabine), Gilotrif (Afatinib), Gleevec (Imatinib Mesylate), Halaven (Eribulin), Herceptin (Trastuzumab), Hexalen (Altretamine), Hycamtin (Topotecan), Hycamtin (Topotecan), Hydrea (Hydroxyurea), Ibrance (Palbociclib), Iclusig (Ponatinib), Idamycin PFS (Idarubicin), Idhifa (Enasidenib), Ifex (Ifosfamide), Imbruvica (Ibrutinib), Imfinzi (Durvalumab), Imlygic (Talimogene Laherparepvec), Inlyta (Axitinib), Intron A alfab (Interferon alfa-2a), Iressa (Gefitinib), Istodax (Romidepsin), Ixempra (Ixabepilone), Jakafi (Ruxolitinib), Jevtana (Cabazitaxel), Kadcyla (Ado-trastuzumab Emtansine), Keytruda (Pembrolizumab), Kisqali (Ribociclib), Kyprolis (Carfilzomib), Lanvima (Lenvatinib), Leukeran (Chlorambucil), Leukine (Sargramostim), Leustatin (Cladribine), Lorbrena (Lorlatinib), Lupron (Leuprolide), Lynparza (Olaparib), Lysodren (Mitotane), Matulane (Procarbazine), Megace (Megestrol), Mekinist (Trametinib), Mektovi (Binimetinib), Mesnex (Mesna), Mustargen (Mechlorethamine), Mutamycin (Mitomycin), Myleran (Busulfan), Mylotarg (Gemtuzumab Ozogamicin), Navelbine (Vinorelbine), Nerlynx (Neratinib), Neulasta (filgrastim), Neulasta (pegfilgrastim), Neupogen (filgrastim), Nexavar (Sorafenib), Nilandron (Nilandron (nilutamide)), Ninlaro (Ixazomib), Nipent (Pentostatin), Nolvadex (Tamoxifen), Odomzo (Sonidegib), Oncaspar (Pegaspargase), Oncovin (Vincristine), Opdivo (Nivolumab), Panretin (Alitretinoin), Paraplatin (Carboplatin), Perjeta (Pertuzumab), Platinol (Cisplatin), PlatinolAQ (Cisplatin), Pomalyst (Pomalidomide), Portrazza (Necitumumab), Proleukin (Aldesleukin), Purinethol (Mercaptopurine), Reclast (Zoledronic acid), Revlimid (Lenalidomide), Rituxan (Rituximab), RoferonA alfaa (Interferon alfa-2a), Rubex (Doxorubicin), Rubraca (Rucaparib), Rydapt (Midostaurin), Sandostatin (Octreotide), Soltamox (Tamoxifen), Sprycel (Dasatinib), Stivarga (Regorafenib), Sutent (Sunitinib), Sylvant (Siltuximab), Synribo (Omacetaxine), Tabloid (Thioguanine), Taflinar (Dabrafenib), Tagrisso (Osimertinib), Talzenna (Talazoparib), Tarceva (Erlotinib), Targretin Capsules (Bexarotene), Tasigna (Decarbazine), Taxol (Paclitaxel), Taxotere (Docetaxel), Tecentriq (Atezolizumab), Temodar (Temozolomide), Tepadina (Thiotepa), Thioplex (Thiotepa), Tibsovo (Ivosidenib), Toposar (Etoposide), Torisel (Temsirolimus), Treanda (Bendamustine hydrochloride), Trelstar (Triptorelin), Tykerb (lapatinib), Unituxin (Dinutuximab), Valstar (Valrubicin), Varubi (Rolapitant), Vectibix (Panitumumab), Velban (Vinblastine), Velcade (Bortezomib), Venclexta (Venetoclax), Vepesid (Etoposide), Vepesid (Etoposide Injection), Verzenio (Abemaciclib), Vesanoid (Tretinoin), Vidaza (Azacitidine), Vincasar PFS (Vincristine), Vincrex (Vincristine), Vistogard (Uridine Triacetate), Vitrakvil (Larotrectinib), Vizimpro (Dacomitinib), Votrient (Pazopanib), Vumon (Teniposide), Wellcovorin IV (Leucovorin), Xalkori (Crizotinib), Xeloda (Capecitabine), Xospata (Gilteritinib), Xtandi (Enzalutamide), Yervoy (Ipilimumab), Yescarta (Axicabtagene), Yondelis (Trabectedin), Zaltrap (Ziv-aflibercept), Zanosar (Streptozocin), Zejula (Niraparib), Zelboraf (Vemurafenib), Zevalin (Ibritumomab Tiuxetan), Zoladex (Goserelin), Zolinza (Vorinostat), Zometa (Zoledronic acid) Zortress (Everolimus),,Zydelig (Idelalisib), Zykadia (Ceritinib), and Zytiga (Abiraterone). In some embodiments, the anti-cancer agent is selected from: Alkylating Agents: Altretamine, Bendamustine, Busulfan, Carmustine, Chlorambucil, Cyclophosphamide, Dacarbazine, Ifosfamide, Lomustine, Mechlorethamine, Melphalan, Procarbazine, Streptozocin, Temozolomide, Thiotepa, Trabectedin; Platinum Coordination Complexes: Carboplatin, Cisplatin, Oxaliplatin; Bleomycin, Dactinomycin, Daunorubicin, Doxorubicin, Epirubicin, Idarubicin, Mitomycin, Mitoxantrone, Plicamycin, Valrubicin, Antimetabolites: Antifolates: Methotrexate, Pemetrexed, Pralatrexate, Trimetrexate; Purine Analogues: Azathioprine, Cladribine, Fludarabine, Mercaptopurine, Thioguanine; Pyrimidine Analogues: Azacitidine, Capecitabine, Cytarabine, Decitabine, Floxuridine, Fluorouracil, Gemcitabine, Trifluridine/Tipracil; Biologic Response Modifiers: Aldesleukin (IL-2), Denileukin Diftitox, Interferon Gamma; Histone Deacetylase Inhibitors: Belinostat, Panobinostat, Romidepsin, Vorinostat; Hormonal Agents: Antiandrogens: Abiraterone, Apalutamide, Bicalutamide, Cyproterone, Enzalutamide, Flutamide, Nilutamide; Antiestrogens (including Aromatase Inhibitors): Anastrozole, Exemestane, Fulvestrant, Letrozole, Raloxifene, Tamoxifen, Toremifene; Gonadotropin Releasing Hormone Analogues: Degarelix, Goserelin, Histrelin, Leuprolide, Triptorelin; Peptide Hormones: Lanreotide, Octreotide, Pasireotide; Monoclonal Antibodies: Alemtuzumab, Atezolizumab, Avelumab, Bevacizumab, Blinatumomab, Brentuximab, Cemiplimab, Cetuximab, Daratumumab, Dinutuximab, Durvalumab, Elotuzumab, Gemtuzumab, Inotuzumab Ozogamicin, Ipilimumab, Mogamulizumab, Moxetumomab Pasudotox, Necitumumab, Nivolumab, Ofatumumab, Olaratumab, Panitumumab, Pembrolizumab, Pertuzumab, Ramucirumab, Rituximab, Tositumomab, Trastuzumab, Protein Kinase Inhibitors, Abemaciclib, Acalabrutinib, Afatinib, Alectinib, Axitinib, Binimetinib, Bortezomib, Bosutinib, Brigatinib, Cabozantinib, Carfilzomib, Ceritinib, Cobimetinib, Copanlisib, Crizotinib, Dabrafenib, Dacomitinib, Dasatinib, Duvelisib, Enasidenib, Encorafenib, Erlotinib, Gefitinib, Gilteritinib, Glasdegib, Ibrutinib, Idelalisib, Imatinib, Ivosidenib, Ixazomib, Lapatinib, Larotrectinib, Lenvatinib, Lorlatinib, Midostaurin, Neratinib, Nilotinib, Niraparib, Olaparib, Osimertinib, Palbociclib, Pazopanib, Pexidartinib, Ponatinib, Regorafenib, Ribocicib, Rucaparib, Ruxolitinib, Selumetinib, Sonidegib, Sorafenib, Sunitinib, Talazoparib, Trametinib, Vandetanib, Vemurafenib, Vismodegib, Zanubrutinib; Taxanes: Cabazitaxel, Docetaxel, Paclitaxel; Topoisomerase Inhibitors: Etoposide, Irinotecan, Teniposide, Topotecan; Vinca Alkaloids: Vinblastine, Vincristine, Vinorelbine; or Asparaginase (Pegaspargase), Bexarotene, Eribulin, Everolimus, Hydroxyurea, Ixabepilone, Lenalidomide, Mitotane, Omacetaxine, Pomalidomide, Tagraxofusp, Telotristat, Temsirolimus, Thalidomide, or Venetoclax.

[0334] As used herein, the term “anti-tumor effect” refers to a biological effect that can present as a decrease in tumor volume, a decrease in the number of tumor cells, a decrease in tumor cell proliferation, a decrease in the number of metastases, an increase in overall or progression-free survival, an increase in life expectancy, or amelioration of various physiological symptoms associated with the tumor.

[0335] As used herein, the term “progression-free survival,” or “PFS,” refers to the time from the treatment date to the date of disease progression per the revised IWG Response Criteria for Malignant Lymphoma or death from any cause.

[0336] As used herein, the terms “serum level” and “serum concentration” refer to the amount of an analyte in the serum of a subject. Serum levels of a given analyte are measured using any method known in the art. For example, cytokine serum levels are measured using an enzyme-linked immunosorbent assay (ELISA). In one particular embodiment, cytokine serum levels are measured using an EMDmillipore LUMINEX® xMAP® multiplex assay.

[0337] As used herein, the term “dosing interval,” refers to the amount of time that elapses between multiple doses of a formulation disclosed herein being administered to a subject. Dosing interval can thus be indicated as ranges.

[0338] Doses can be presented as a “weight based dose” or as a “body surface area (BSA) based dose.” A weight based dose is a dose that is administered to a patient that is calculated based on the weight of the patient, e.g., mg/kg. A BSA based dose is a dose that is administered to a patient that is calculated based on the surface area of the patient, e.g., mg/m2. The two forms of dose measurement can be converted for human dosing by multiplying the weight based dose by 37 or dividing the BSA based dose by 37. For example, a dose of 60 mg/kg to be administered to a human subject is equivalent to a 2220 mg/m2 dose of the same drug to be administered to the same subject.

[0339] As used herein, the term “dosing frequency” refers to the frequency of administering doses of a formulation disclosed herein in a given time. Dosing frequency can be indicated as the number of doses per a given time.

[0340] As described herein, any concentration range, percentage range, ratio range or integer range is to be understood to include the value of any integer within the recited range and, when appropriate, fractions thereof (including one-tenth and one-hundredth of an integer), unless otherwise indicated.

[0341] The tumor microenvironment is an important aspect of cancer biology that contributes to tumor initiation, tumor progression and responses to therapy. The tumor microenvironment is composed of a heterogeneous cell population that includes malignant cells and cells that support tumor proliferation, invasion, and metastatic potential though extensive crosstalk. Tumor cells often induce an immunosuppressive microenvironment, which favors the development of immunosuppressive populations of immune cells, such as myeloid-derived suppressor cells (MDSCs), tumor-associated macrophage (TAM), and regulatory T cells (Tregs).

[0342] Therefore, targets within the tumor microenvironment have been uncovered that can help direct and improve the actions of various cancer therapies, notably immunotherapies that work by potentiating host antitumor immune responses.

### Certain Modular RNA Carrier Systems

[0343] In some embodiments, this disclosure provides for modular RNA carrier systems, which can be complexes, nucleic acid nanodevices, or RNA carriers. In a modular RNA carrier system, RNA acts as a structural element and/or an informational element. Modular RNA carrier systems can also serve as a scaffold for the formation of other nucleic acid-based structures (e.g., nucleic acid nanodevices). Nucleic acid nanodevices may be prepared by methods using one or more nucleic acid oligonucleotides. For example, such nanostructures may be assembled based on the concept of base-pairing. While no specific sequence is required, the sequences of each oligonucleotide must be partially complementary to certain other oligonucleotides to enable hybridization of all strands or sequences within a single oligonucleotide to enable hybridization and assembly of the nanostructure. For example, in certain embodiments, the nucleic acid nanodevice is an DNA rectangle nanostructure, self-assembled from one single-stranded DNA molecule.

### Structural Aspects of Modular RNA Carrier Systems

[0344] The modular RNA carrier systems include structural features which serve to enhance the efficacy of the delivered RNA in part from the RNA or DNA carrier. In some embodiments, the modular RNA carrier system is designed to have all or a portion of the oligonucleotide sequence to be complementary to all or a portion of a ssDNA or ssRNA oligonucleotide. In some embodiments, the oligonucleotide sequence can comprise RNA, DNA, modified RNA, modified DNA, or combinations thereof. In some embodiments, the 5′- or 3′-ends of the oligonucleotide is modified with a oligonucleoside which can bind to a polypeptide.

[0345] In some embodiments, the oligonucleotide is 5′-modified with a thiol-comprising nucleotide. In some embodiments, the thiol-comprising nucleotide is further reacted with a cross-functional linker. In some embodiments, the cross-functional linker is sulfo-SMCC ((sulfosuccinimidyl 4-(N-maleimidomethyl)cyclohexane-1-carboxylate), ThermoFisher cat. 22322). In some embodiments, the cross-functional linker is Sulfo-LC-SPDP (sulfosuccinimidyl 6-(3′-(2-pyridyldithio) propionamido) hexanoate) (ThermoFisher cat. 21650). In some embodiments, the sequence of the oligonucleotide sequence which is complementary to all or a portion of a ssDNA is selected from the following loading oligonucleotide sequences (Loading Oligonucleotides): SEQ ID Nos. 1-12.

[0346] Any of the aforementioned oligonucleotide sequences is 5′ or 3′ modified as described herein.

[0347] In some embodiments, the cross-functional compound can further be reacted with an agent. In some aspects, the agent is a protein or peptide comprising a lysine amino acid. The amine on the lysine can react with the amino-reactive cross-functional compound to form a loading oligonucleotide-functionalized agent. In some embodiments, the oligonucleotide-functionalized agent is hybridized to a portion or all of the ssDNA.

[0348] In certain embodiments, the modular RNA carrier system can include or exclude the use of “staple strands.” It was surprisingly found that in some embodiments, the modular RNA carrier system can self-assemble with no added stable strands. As used herein, the term “staple strands” refers to short single-stranded oligonucleotides of about 20 to about 40 nucleotides in length, such as 20, 21, 22, 23, 24, 25, 26,27, 28, 29, 30, 31, 32, 33, 34, 35, 36, 37, 38, 39, or 40 nucleotides in length, wherein one end of the staple strand hybridizes with a region of the scaffold strand, and the second end of the staple strand hybridizes with another region of the scaffold strand, thereby “stapling” the two regions of the scaffold strand. Exemplary staple strand sequences can those disclosed in US20200390814, which is herein incorporated by reference.

[0349] As used herein, the term “scaffold strand” refers to a polynucleotide sequence which is about 45 to about 15,000 nucleotides in length, and can form tertiary structures via Watson-Crick base pairing and/or intra-duplex interactions.

[0350] The assembly of such modular RNA carrier systems may be based on base-pairing principles or other non-canonical binding interactions. For example, while no specific DNA sequence is required, regions of complementary within a single DNA molecule or between multiple DNA molecules may be used for assembly. Persons of ordinary skill in the art will readily understand and appreciate that the optimal sequence for any given modular RNA carrier system will depend on the selected shape, size, nucleic acid content, and selected use of such NA structure. In certain embodiments, wherein the nanostructure comprises more than one ssRNA molecule (e.g. two or more oligonucleotides/polynucleotides), each ssRNA molecule may have a region that is complementary to a region on another ssRNA molecule to enable hybridization of the strands and assembly of the nanostructure. In certain other embodiments, wherein the nanostructure consists of a single ssRNA molecule (i.e., a single unimolecular RNA oligonucleotide/polynucleotide), regions within the molecule may be complementary to certain other regions within the molecule to enable hybridization and assembly of the nanostructure. Modular RNA carrier systems produced in accordance with the present disclosure are typically nanometer-scale structures (e.g., having length scale of 1 to 1000 nanometers), although, in some instances, the term “nanostructure” herein may refer to micrometer-scale structures (e.g., assembled from more than one nanometer-scale or micrometer-scale structure). In some embodiments, a Nucleic acid nanodevice described herein has a length scale of 1 to 1000 nm, 1 to 900 nm, 1 to 800 nm, 1 to 700 nm, 1 to 600 nm, 1 to 500 nm, 1 to 400 nm, 1 to 300 nm, 1 to 200 nm, 1 to 100 nm or 1 to 50 nm. In some embodiments, a modular RNA carrier system described herein has a length scale of greater than 1000 nm. In some embodiments, a modular RNA carrier system described herein has a length scale of 1 micrometer to 2 micrometers.

[0351] In certain embodiments, the modular RNA carrier system comprises, consists essentially of, or consists of multiple ssRNA molecules (e.g., more than one oligonucleotide/polynucleotide strands, such as two or more ssRNA molecules). In certain embodiments, the RNA oligonucleotide molecule carrier comprises two or more ssRNA molecules, which are capable of self-assembling (or configured to self-assemble) into a nanostructure. In certain embodiments, the modular RNA carrier system is assembled from two or more ssRNA molecules through paranemic cohesion crossovers. Thus, in certain embodiments, the modular RNA carrier system comprises two or more ssRNA molecules, wherein the ssRNA molecules self-assemble to form at least one paranemic cohesion crossover.

[0352] In some embodiments, the modular RNA carrier system comprises programmable RNA. Programmable mRNA (also referred to herein as “Pro-mRNA” or “pmrna”) can translate the apoptotic protein to trigger cancer cell death. In some embodiments, Pro-mRNA is activated upon a selected signal event. In some embodiments, the selected signal event is the presence of, or a concentration of, a selected biomolecule. In some embodiments, the biomolecule is a protein, peptide, amino acid, hormone, steroid, or nucleic acid sequence.

[0353] In certain embodiments, the modular RNA carrier system comprises, consists essentially of, or consists of a single ssRNA molecule (i.e., one unimolecular oligonucleotide/polynucleotide strand). In certain embodiments, the modular RNA carrier system is assembled using one ssRNA molecule (e.g., in certain embodiments one and only one, exactly one, or greater than zero and less than two). In certain embodiments, the modular RNA carrier system is comprised of one ssRNA molecule, which is capable of self-assembling into a nanostructure. In certain embodiments, the modular RNA carrier system consists of one ssRNA molecule, which is capable of self-assembling into a nanostructure.

[0354] The length of each RNA strand is variable and depends on, for example, the type of nanostructure to be formed. In certain embodiments, the modular RNA carrier system is comprised of multiple oligonucleotide strands. In certain embodiments, the oligonucleotide strands can be made of RNA, DNA, or both. In certain embodiments, the modular RNA carrier system is comprised of a single (i.e., unimolecular) oligonucleotide strand. In certain embodiments, the oligonucleotide or RNA strand is about 15 nucleotides in length to about 150,000 nucleotides in length, about 15 to about 7500 nucleotides in length, about 3000 to about 7000 nucleotides in length, about 5000 to about 7000 nucleotides in length, about 5500 to about 6500 nucleotides in length, about 15 to about 5000 nucleotides in length, about 15 to about 4000 nucleotides in length, about 15 to about 3000 nucleotides in length, about 250 to about 3000 nucleotides in length, about 500 to about 3000 nucleotides in length, about 1000 to about 3000 nucleotides in length, about 1500 to about 2500 nucleotides in length, or between any of the aforementioned nucleotide lengths. In certain embodiments, the at least one ssRNA molecule (i.e., oligonucleotide or RNA strand) is about 10 nucleotides in length to about 200,000 nucleotides in length, the at least one ssRNA molecule (i.e., oligonucleotide or RNA strand) is about 10 nucleotides in length to about 100,000 nucleotides in length, the at least one ssDNA molecule (i.e., oligonucleotide or RNA strand) is about 10 nucleotides in length to about 90,000 nucleotides in length, about 10 to about 80,000 nucleotides in length, about 10 to about 70,000 nucleotides in length, about 10 to about 60,000 nucleotides in length, about 10 to about 50,000 nucleotides in length, about 10 to about 40,000 nucleotides in length, about 10 to about 30,000 nucleotides in length, about 10 to about 25,000 nucleotides in length, or about 10 to about 20,000 nucleotides in length. In certain embodiments, the ssRNA molecule (i.e., oligonucleotide or RNA strand) is about 15 nucleotides in length to about 20,000 nucleotides in length, the ssRNA molecule (i.e., oligonucleotide or RNA strand) is about 15 nucleotides in length to about 10,000 nucleotides in length, about 15 to about 7500 nucleotides in length, about 3000 to about 7000 nucleotides in length, about 5000 to about 7000 nucleotides in length, about 1500 to about 6500 nucleotides in length, about 1000 to about 7000 nucleotides in length, about 5500 to about 6500 nucleotides in length, about 15 to about 5000 nucleotides in length, about 15 to about 4000 nucleotides in length, about 15 to about 3000 nucleotides in length, about 250 to about 3000 nucleotides in length, about 500 to about 3000 nucleotides in length, about 1000 to about 3000 nucleotides in length, or about 1500 to about 2500 nucleotides in length. In certain embodiments, the ssRNA molecule (i.e., oligonucleotide or RNA strand) is about 100, about 200, about 300, about 400, about 500, about 600, about 700, about 800, about 900, about 1000, about 1100, about 1200, about 1300, about 1400, about 1500, about 1600, about 1700, about 1800, about 1900, about 2000, about 2100, about 2200, about 2300, about 2400, about 2500, about 2600, about 2700, about 2800, about 2900, about 3000, about 3100, about 3200, about 3300, about 3400, about 3500, about 3600, about 3700, about 3800, about 3900, about 4000, about 4100, about 4200, about 4300, about 4400, about 4500, about 4600, about 4700, about 4800, about 4900, about 5000, about 5100, about 5 5200, about 5300, about 5400, about 5500, about 5600, about 5700, about 5800, about 5900, about 6000, about 6100, about 6200, about 6300, about 6400, about 6500, about 6600, about 6700, about 6800, about 6900, about 7000, about 7100, about 7200, about 7300, about 7400, about 7500, about 7600, about 7700, about 7800, about 7900, about 8000, about 8100, about 8200, about 8300, about 8400, about 8500, about 8600, about 8700, about 8800, about 8900, about 9000, about 9100, about 9200, about 9300, about 9400, about 9500, about 9600, about 9700, about 9800, about 9900, about 10000, about 10100, about 10200, about 10300, about 10400, about 10500, about 10600, about 10700, about 10800, about 10900, about 11000, about 11000, about 11100, about 11200, about 11300, about 11400, about 11500, about 11600, about 11700, about 11800, about 11900, about 12000, about 12100, about 12200, about 12300, about 12400, about 12500, about 12600, about 12700, about 12800, about 12900 nucleotides in length, about 13000 nucleotides in length, about 14000 nucleotides in length, about 15000 nucleotides in length, about 16000 nucleotides in length, about 17000 nucleotides in length, about 18000 nucleotides in length, about 19000 nucleotides in length, about 20000 nucleotides in length, about 25000 nucleotides in length, about 30000 nucleotides in length, about 35000 nucleotides in length, about 40000 nucleotides in length, about 45000 nucleotides in length, about 50000 nucleotides in length, about 75000 nucleotides in length, about 100000 nucleotides in length, about 125000 nucleotides in length, about 150000 nucleotides in length, about 175000 nucleotides in length or about 200000 nucleotides in length.

[0355] In some embodiments, the DNA or RNA is synthesized de novo using chemical or biological methods. The DNA or RNA can be chemically synthesized in a step-wise manner. In some embodiments, the DNA or RNA can be synthesized using the cyanoethyl phosphoramidite method (Beaucage, S. L., and Caruthers, M. H., Tet. Let. 22:1859,1981);

[0356] nucleoside H-phosphonate method (Garegg et al., Tet. Let. 27:4051-4054, 1986; Froehler et al., Nucl. Acid. Res. 14:5399-5407, 1986; Garegg et al., Tet. Let. 27:4055-4058, 1986, Gaffney et al., Tet. Let. 29:2619-2622,1988). These chemistries can be performed by a variety of automated oligonucleotide synthesizers available in the market.

[0357] In certain embodiments, about 60-99% of the modular RNA carrier system is double stranded and about 1-40% of the modular RNA carrier system is single stranded.

[0358] In certain embodiments, about 95% of the modular RNA carrier system is double stranded and about 5% of the modular RNA carrier system is single stranded.

[0359] In certain embodiments, the modular RNA carrier system comprises a rectangular sheet nanostructure.

[0360] In certain embodiments, the modular RNA carrier system comprises a nucleic acid sequence about 1500 to about 2500 nucleotides in length.

[0361] In certain embodiments, the nucleic acid sequence of the RNA carrier system is about 1500 to about 2500 nucleotides in length.

[0362] In certain embodiments, the RNA sequences described herein comprise one or more modified nucleic acids. The modified nucleic acids can be a modified ribonucleotide or ribonucleoside. In some embodiments, the modified ribonucleoside can be selected from the NA-incorporated from, in part. 5-Aminoallyluridine-5′-Triphosphate (Trilink, N-1062), biotin-16-Aminoallyluridine-5′-Triphosphate (Trilink, N-5005), or 5-DBCO-PEG4-UTP.

[0363] In some embodiments, this disclosure includes a targeting agent that comprises a nucleic acid nanodevice which can optionally comprise a targeting molecule. The nucleic acid nanodevice relies on nucleic acid self-assembly. There are several reasons for the success of DNA or RNA in nano-construction. First, Watson-Crick base-pairing between complementary DNA or RNA strands is highly predictable and stable. Second, the geometric features of the DNA or RNA double-helix is appropriate for nanoscale assembly: the helix is roughly 2 nm in diameter and 3.4 nm pitch per helical repeat. In addition, the development of several user-friendly software interfaces has facilitated the modeling of even the most intricate DNA or RNA nanostructures for experimental testing. Third, modern organic chemistry and molecular biology provide a diverse toolbox to readily synthesize, modify, and replicate DNA or RNA molecules at a relatively low cost. The biocompatibility of DNA or RNA makes it suitable for the construction of multicomponent nanostructures made from hetero-biomaterials with designed functions.

[0364] In some embodiments, the nucleic acid nanodevice designed based on the principle of DNA tile assembly (Winfree E, Liu F R, Wenzler L A, Seeman N C. Design and self-assembly of two-dimensional DNA crystals. Nature. 1998;394 (6693): 539-44. doi: Doi 10.1038/28998. PubMed PMID: ISI: 000075238700036; He Y, Chen Y, Liu H P, Ribbe A E, Mao CD. Self-assembly of hexagonal DNA two-dimensional (2D) arrays. Journal of the American Chemical Society. 2005;127 (35): 12202-3. doi: Doi 10.1021/Ja0541938. PubMed PMID: ISI: 000231637100027; Yan H, Park S H, Finkelstein G, Reif J H, LaBean T H. DNA-templated self-assembly of protein arrays and highly conductive nanowires. Science. 2003; 301 (5641): 1882-4. doi: DOI 10.1126/science. 1089389. PubMed PMID: ISI: 000185536700043; He Y, Tian Y, Ribbe A E, Mao C D. Highly connected two-dimensional crystals of DNA six-point-stars. Journal of the American Chemical Society. 2006; 128 (50): 15978-9. doi: Doi 10.1021/Ja0665141. PubMed PMID: ISI: 000242825600025, each of which is incorporated by reference). DNA tile assembly is a versatile and powerful method wherein small building blocks of DNA tiles, motifs, or even single-stranded DNA-along with the interactions between the building blocks—can be pre-designed using sticky-end cohesion. The recognition between sticky ends are programed with several algorithms that guide DNA building blocks to self-assemble into large 2D arrays with diverse topological and geometric features. In some embodiments, the DNA nanostructure is based on the principle of scaffolded DNA-origami (Rothemund, et al. Folding DNA to create nanoscale shapes and patterns. Nature. 2006;440 (7082): 297-302. doi: Doi 10.1038/Nature04586. PubMed PMID: WOS: 000235997600044; Douglas S M, Dietz H, Liedl T, Hogberg B, Graf F, Shih WM. Self-assembly of DNA into nanoscale three-dimensional shapes. Nature. 2009; 459 (7245): 414-8. doi: Doi 10.1038/Nature08016. PubMed PMID: ISI: 000266243700043; Han D R, Pal S, Nangreave J, Deng Z T, Liu Y, Yan H. DNA Origami with Complex Curvatures in Three-Dimensional Space. Science. 2011; 332 (6027): 342-6. doi: DOI 10.1126/science.1202998. PubMed PMID: ISI: 000289516600042; Han DR, Pal S, Yang Y, Jiang S X, Nangreave J, Liu Y, Yan H. DNA Gridiron Nanostructures Based on Four-Arm Junctions. Science. 2013; 339 (6126): 1412-5. doi: DOI 10.1126/science.1232252. PubMed PMID: ISI: 000316740700037, each of which is incorporated by reference). Scaffolded DNA origami is a technique which enables the folding of a long, single-stranded M13mp18 genomic DNA into a designed target shape by using a plurality of short DNA strand sequences referred to herein as “staple strands.” In some embodiments, the folding process is programmed resulting in the formation of structures in near-quantitative yields for many designs with unpurified staple strands. The inventors have surprisingly discovered that nucleic acid (DNA or RNA) nanostructures, including DNA origami, are fully addressable due to the unique sequence of long DNA or RNA, where each staple strand results in possible modification positions that can be linked to other functional materials with useful biological properties, for both DNA origami and other nucleic acid (DNA or RNA) nanostructures. In some embodiments, the staple strands comprise a polynucleotide with a portion of which is complementary to a second oligonucleotide, wherein the second oligonucleotide is connected to an other moiety. In some embodiments, the other moiety is selected from a protein tag, a targeting molecule, or combinations thereof. In some embodiments, the long genomic strand is RNA. In some embodiments, the long genomic strand is DNA.

[0365] In some embodiments, the RNA nanostructure (e.g., Pro-mRNA) has a shape selected from a semi-flat or flat sheet which may be in the form of a square or rectangle, a tube, a sphere, a tetrahedron, a box, a rectangle, and a round flat disc. The complex can be designed using algorithms to generate appropriate sequences for customized DNA or RNA structures to minimize unwanted interactions between DNA or RNA strands and help achieve a high folding yield of designed structures. Design parameters including the size, shape, and helical directions of Nucleic acid nanodevices can be optimized to improve targeting molecule loading efficiency of Nucleic acid nanodevices. The assembly of such DNA or RNA structures is achieved through thermal annealing processes and the obtained structures are purified with dialysis spin columns, gel electrophoresis methods, or size-exclusion chromatography methods. Atomic force microscopy (AFM) confirms the correct formation of the designed DNA nanostructure. In some embodiments, the DNA or RNA nanodevice can include or exclude those in U.S. Pat. Nos. 8,440,811; 8,552,167; 11,254,941; U.S. Patent Publication No. US20200390814; U.S. Patent Publication No. US20190240248; and U.S. Patent Publication No. US20220177887, all of which are herein incorporated by reference.

[0366] In some embodiments, the modular RNA carrier systems comprise a plurality of unique staple strands where each unique staple strand can serve as an addressable surface location to organize modular functional targeting molecules. Different targeting molecules are attached to the DNA or RNA nanostructure with a specific DNA or RNA sequence (“second oligonucleotide”) that is comprises a portion which is complementary to a portion of the sequence of staple strand sequence protruding from a DNA or RNA nanostructure (“first oligonucleotide”), whereby all the geometric parameters are precisely designed and have an addressable surface. In some embodiments, the staple strand sequences are oriented based on the conformations of the DNA or RNA nanostructure. The resulting construct enables the configuration of targeting molecules, including the distance between said molecules, their multivalency, and their relative geometry. Rows of different staple strands can be created to be at a precise distance apart to achieve optimal binding distance to increase the avidity of the targeting molecules to their cognate antigen.

[0367] In some embodiments, the modular RNA carrier systems are comprised of phosphorothioate backbones or locked nucleic acids to prevent nucleic acid degradation by nucleases. In other embodiments, the nucleic acid nanostructures can comprise an electrostatic coating (e.g. oligolysine-PEG conjugate), to simultaneously stabilize DNA or RNA nanostructures to low-magnesium conditions (including those encountered in the bloodstream) and help reduce degradation by endonucleases.

### Informational Aspects of Modular RNA Carrier Systems

[0368] In some embodiments, the modular RNA carrier systems comprise mRNA which act as informational element for the translation into a polypeptide or protein. In some embodiments, the modular RNA carrier systems further comprise methods of enhancing the mRNA translation by use of an enhancer.

[0369] Without being bound by theory, mRNA translational initiation is highly regulated. Initiation of protein synthesis from mRNA involves the orchestrated recruitment of the ribosome to the initiation codon by a complex of eukaryotic initiation factors (eIFs) that are present in limiting amounts to ensure controlled levels of protein synthesis (Jackson R J, et al., The mechanism of eukaryotic translation initiation and principles of its regulation. Nat Rev Mol Cell Biol. (2010); 11 (2): 113-27; Andaya A, et al., Phosphorylation stoichiometries of human eukaryotic initiation factors. Int J Mol Sci. (2014); 15 (7): 11523-38). Canonical translation initiation involves the proteins eIF4F which recognizes the mRNA 5′ G cap, a trimeric complex with cap binding (eIF4E), mRNA unwinding (eIF4A), and ribosomal loading (eIF4G) activities. The mRNA-bound eIF4F complex is then loaded into the 43S preinitiation complex comprised of the small ribosomal subunit (40S) and other auxiliary factors (eIF1, eIF2-tRNA, eIF3, and eIF5).

[0370] Translation initiation is regulated by secondary and tertiary structures within mRNAs that modulate eIF activity and can increase or decrease translation rates, such as encumbering eIF4A helicase unwinding by stable secondary structures or recruitment of activating auxiliary proteins (Truitt M L, et al., New frontiers in translational control of the cancer genome. Nat Rev Cancer. 2016; 16 (5): 288-304.). Internal ribosome entry sites (IRES) are RNA structures that facilitate direct entry of the translation machinery, which in some instances can bypass 5′ G cap recognition (Terenin I M, et al., A researcher's guide to the galaxy of IRESs. Cell Mol Life Sci. 2017; 74 (8): 1431-1455). In IRES-mediated translation initiation, eIF3 can recognizes the IRES structure directly (Querol-audi J, et al. Architecture of human translation initiation factor 3. Structure. 2013; 21 (6): 920-8; Valášek L S, et al. Embraced by eIF3: structural and functional insights into the roles of eIF3 across the translation cycle. Nucleic Acids Res. 2017; 45 (19): 10948-10968).

[0371] Specialized translation initiation is a novel form of regulation of protein synthesis whereby RNA structures within the 5′-UTR regulate translation rates of specific mRNAs. Like internal ribosomal entry sites (IRES), specialized translational initiation requires the recruitment of eukaryotic initiation factor 3 (eIF3), but specialized translation initiation requires cap recognition by eIF3d, a new 5′-m7GTP recognizing protein.

[0372] In some embodiments, the modular RNA carrier systems do not include an IRES. mRNAs lacking IRESs can still be translated when eIF4F is inhibited through an alternative form of translation initiation, that involves both recognition of specific mRNA structures by eIF3 and mRNA-cap recognition by eIF3d (Lee A S, et al., eIF3 targets cell-proliferation messenger RNAs for translational activation or repression. Nature. 2015; 522 (7554): 111-114; Lee A S, et al., eIF3d is an mRNA cap-binding protein that is required for specialized translation initiation. Nature. 2016; 536 (7614): 96-9).

[0373] In some embodiments, the modular RNA carrier systems include an IRES site. Inclusion of an IRES permits the translation of one or more open reading frames from a mRNA. The IRES element attracts a eukaryotic ribosomal translation initiation complex and promotes translation initiation. There are two known mechanisms by which translation is initiated in eukaryotes. The first is the canonical cap-dependent mechanism that is used by the most eukaryotic mRNAs, which requires an 5′ G cap, initiator Met-tRNAmet, initiation factor proteins, directional scanning, and GTP hydrolysis to place a translationally competent ribosome at the start codon. The second mechanism is cap-independent initiation. This mechanism bypasses the need for the cap and often many of the protein factors, using cis-acting IRES RNA elements to recruit the ribosome and initiate protein synthesis.

[0374] A number of linear IRES sequences are known and may be included in a recombinant nucleic acid molecule as described herein. For example, linear IRES sequences may be derived from a wide variety of viruses, such as from leader sequences of picoronaviruses (e.g., encephalomyocarditis virus (EMCV) UTR) (Jang et al., J. Virol., 63:1651-1660 (1989)), the polio leader sequence, the hepatitis A virus leader, the hepatitis C virus IRES, human rhinovirus type 2 IRES (Dobrikova et al., Proc. Natl. Acad. Sci., 100 (25): 15125-15130 (2003)), an IRES element from the foot and mouth disease virus (Ramesh et al., Nucl. Acid Res., 24:2697-2700 (1996)), and a giardiavirus IRES (Garlapati et al., J. Biol. Chem., 279 (5): 3389-3397 (2004)). A variety of nonviral IRES sequences also can be included in a mRNA sequence, including IRES sequences from yeast, the human angiotensin II type 1 receptor IRES (Martin et al., Mol. Cell Endocrinol., 212:51-61 (2003)), fibroblast growth factor IRESs (e.g., FGF-1 IRES and FGF-2 IRES, Martineau et al., Mol. Cell. Biol., 24 (17): 7622-7635 (2004)), vascular endothelial growth factor IRES (Baranick et al., Proc. Natl. Acad. Sci. U.S.A., 105 (12): 4733-4738 (2008); Stein et al., Mol. Cell. Biol., 18 (6): 3112-3119 (1998); Bert et al., RNA, 12 (6): 1074-1083 (2006)), and insulin-like growth factor 2 IRES (Pedersen et al., Biochem. J., 363 (Pt 1): 37-44 (2002)), the contents of each of which are herein incorporated by reference.

[0375] IRES sequences and vectors encoding IRES elements can be obtained from a variety of sources, such as, for example, Clontech (Mountain View, Calif.), Invivogen (San Diego, Calif.), Addgene (Cambridge, Mass.) and GeneCopoeia (Rockville, Md.), and IRESite: The database of experimentally verified IRES structures (iresite.org), or reprod.njmu.edu.cn/cgi-bin/iresbase/download.php.

[0376] In some embodiments, IRES sequences are those described in: Shira Weingarten-Gabbay et al., Systematic discovery of cap-independent translation sequences in human and viral genomes. Science 351, aad4939 (2016); DOI: 10.1126/science.aad4939; or Zhao, et al., IRESbase: A Comprehensive Database of Experimentally Validated Internal Ribosome Entry Sites, Genomics, Proteomics & Bioinformatics, (2020); 18 (2): 129-139; the contents of each of which are herein incorporated by reference.

[0377] As used herein, the terms “internal ribosome entry site,” “internal ribosome entry sequence,” “IRES” and “IRES sequence region” are used interchangeably herein and refer to cis elements of viral or human cellular RNAs (mRNA) that bypass the steps of canonical eukaryotic cap-dependent translation initiation. The canonical cap-dependent mechanism used by most eukaryotic mRNAs requires an 5′ G cap, an initiator Met-tRNAmet, initiation factor proteins, directional scanning, and GTP hydrolysis to place a translationally competent ribosome at the start codon. IRESs are comprised of a long and highly structured 5′-UTR which mediates the translation initiation complex binding and catalyzes the formation of a functional ribosome.

[0378] Exemplary sequences encoding IRESs for use in the RNA molecules of the present disclosure are set forth in the sequences of SEQ ID NO: 1-228 or SEQ ID NO: 229-17201 in U.S. Pat. No. 11,685,924, herein incorporated by reference. In some embodiments, the sequences encoding IRES have 70%-99% homology to SEQ ID NOs. 1-228 or SEQ ID NO: 229-17201 in U.S. Pat. No. 11,685,924. In some embodiments, exemplary sequences encoding IRESs for use in the RNA molecules of the present disclosure are all or a portion of the IRES sequence from encephalomyocarditis virus (EMCV). In some embodiments, exemplary sequences encoding IRES have 70-99% homology to the IRES sequence from encephalomyocarditis virus (EMCV). In some embodiments, the IRES sequence is a portfion of the IRES sequence from EMCV. In some embodiments, the portion of the IRES sequence from EMCV is 60-99% of the nucleotide length of EMCV. In some embodiments, the portion of the IRES sequence from EMCV is 60, 61, 62, 63, 64, 65, 66, 67, 68, 69, 70, 71, 72, 73, 74, 75, 76, 77, 78, 79, 80, 81, 82, 83, 84, 85, 86, 87, 88, 89, 90, 91, 92, 93, 94, 95, 96, 97, 98, 99, or 100% the full nucleotide length of the IRES sequence from EMCV. In some embodiments, the EMCV sequence has the following sequence:

(SEQ ID NO: 18)
GAGGGCCCGGAAACCUGGCCCUGUCUUCUUGACGAGCAUUCCUAGGGGU
CUUUCCCCUCUCGCCAAAGGAAUGCAAGGUCUGUUGAAUGUCGUGAAGG
AAGCAGUUCCUCUGGAAGCUUCUUGAAGACAAACAACGUCUGUAGCGAC
CCUUUGCAGGCAGCGGAACCCCCCACCUGGCGACAGGUGCCUCUGCGGC
CAAAAGCCACGUGUAUAAGAUACACCUGCAAAGGCGGCACAACCCCAGU
GCCACGUUGUGAGUUGGAUAGUUGUGGAAAGAGUCAAAUGGCUCACCUC
AAGCGUAUUCAACAAGGGGCUGAAGGAUGCCCAGAAGGUACCCCAUUGU
AUGGGAUCUGAUCUGGGGCCUCGGUGCACAUGCUUUACAUGUGUUUAGU
CGAGGUUAAAAAACGUCUAGGCCCCCCGAACCACGGGGACGUGGUUUUC
CUUUGAAAAACACGAUGAUAA.

[0379] In some embodiments, the modular RNA carrier systems comprise an enhancer. In some embodiments, the enhancer can bind with the RNA binding protein sequence which comprises the eukaryotic initiation factor 3 (elF3) protein complex. The eIF-3 protein complex associates with the 40S ribosome and facilitates the recruitment of eIF-1, eIF-1A, eIF-2: GTP: methionyl-tRNAi and eIF-5 to form the 43S pre-initiation complex (43S PIC). The eIF-3 complex stimulates mRNA recruitment to the 43S PIC and scanning of the mRNA for AUG recognition. The eIF-3 complex is also required for disassembly and recycling of post-termination ribosomal complexes and subsequently prevents premature joining of the 40S and 60S ribosomal subunits prior to initiation. The eIF-3 complex specifically targets and initiates translation of a subset of mRNAs involved in cell proliferation, including cell cycling, differentiation and apoptosis, and uses different modes of RNA stem-loop binding to exert either translational activation or repression.

[0380] In some embodiments, the enhancer is a 5′ untranslated region (UTR) and/or a 3′UTR, wherein either or both may independently contain one or more different nucleoside modifications. In such embodiments, nucleoside modifications may also be present in the translatable region. Also provided are nucleic acids containing a Kozak sequence. Additionally, provided are nucleic acids containing one or more intronic nucleotide sequences capable of being excised from the nucleic acid.

[0381] The first terminal region may comprise a 5′ untranslated region (UTR) which may be the native 5′ UTR of the encoded polypeptide of interest or may be heterologous to the encoded polypeptide of interest. In one aspect, the 5′UTR may comprise at least one translation initiation sequence such as a kozak sequence, an internal ribosome entry site (IRES) and/or a fragment thereof. In some embodiments, the 5′UTR may comprise at least one fragment of an IRES.

[0382] Natural 5′ UTRs are involved in translation initiation. In some embodiments, natural 5′ UTR's comprise Kozak sequences. Kozak sequences can include the consensus CCR (A/G) CCAUGG, where R is a purine (adenine or guanine) three bases upstream of the start codon (AUG), which is followed by another ‘G’.

[0383] In some embodiments, the 5′ (or 3′ UTR) UTRs of this disclosure can include introns or portions incorporated into the flanking regions of the nucleic acids or mRNA of the invention.

### Synthesis of Engineered Derivatives

[0384] In some embodiments, this disclosure provides for mRNA comprising modified nucleic acids. Nucleic acids for use in accordance with the present disclosure may be prepared according to any available technique including, but not limited to chemical synthesis, enzymatic synthesis, which is generally termed in vitro transcription, enzymatic or chemical cleavage of a longer precursor, etc. Methods of synthesizing RNAs are known in the art (see, e.g., Gait, M. J. (ed.) Oligonucleotide synthesis: a practical approach, Oxford [Oxfordshire], Washington, D.C.: IRL Press, 1984; and Herdewijn, P. (ed.) Oligonucleotide synthesis: methods and applications, Methods in Molecular Biology, v. 288 (Clifton, N.J.) Totowa, N.J.: Humana Press, 2005; both of which are incorporated herein by reference).

[0385] Modified nucleic acids need not be uniformly modified along the entire length of the molecule. Different nucleotide modifications and/or backbone structures may exist at various positions in the nucleic acid. One of ordinary skill in the art will appreciate that the nucleotide analogs or other modification(s) may be located at any position(s) of a nucleic acid such that the function of the nucleic acid is not substantially decreased. A modification may also be a 5′ or 3′ terminal modification. The nucleic acids may contain at a minimum one and at maximum 100% modified nucleotides, or any intervening percentage, such as at least 5% modified nucleotides, at least 10% modified nucleotides, at least 25% modified nucleotides, at least 50% modified nucleotides, at least 80% modified nucleotides, or at least 90% modified nucleotides. For example, the nucleic acids may contain a modified pyrimidine such as uracil or cytosine. In some embodiments, at least 5%, at least 10%, at least 25%, at least 50%, at least 80%, at least 90% or 100% of the uracil in the nucleic acid is replaced with a modified uracil. The modified uracil can be replaced by a compound having a single unique structure, or can be replaced by a plurality of compounds having different structures (e.g., 2, 3, 4 or more unique structures). In some embodiments, at least 5%, at least 10%, at least 25%, at least 50%, at least 80%, at least 90% or 100% of the cytosine in the nucleic acid is replaced with a modified cytosine. The modified cytosine can be replaced by a compound having a single unique structure, or can be replaced by a plurality of compounds having different structures (e.g., 2, 3, 4 or more unique structures).

[0386] In some embodiments, this disclosure provides for mRNA encoding a peptide or polypeptide. Generally, the shortest length of a modified mRNA of the present disclosure can be the length of an mRNA sequence that is sufficient to encode for a dipeptide. In another embodiment, the length of the mRNA sequence is sufficient to encode for a tripeptide. In another embodiment, the length of an mRNA sequence is sufficient to encode for a tetrapeptide. In another embodiment, the length of an mRNA sequence is sufficient to encode for a pentapeptide. In another embodiment, the length of an mRNA sequence is sufficient to encode for a hexapeptide. In another embodiment, the length of an mRNA sequence is sufficient to encode for a heptapeptide. In another embodiment, the length of an mRNA sequence is sufficient to encode for an octapeptide. In another embodiment, the length of an mRNA sequence is sufficient to encode for a nonapeptide. In another embodiment, the length of an mRNA sequence is sufficient to encode for a decapeptide.

[0387] Examples of dipeptides that the modified nucleic acid sequences can encode for include, but are not limited to, carnosine and anserine.

[0388] In a further embodiment, the mRNA is greater than 30 nucleotides in length. In another embodiment, the RNA molecule is greater than 35 nucleotides in length. In another embodiment, the length is at least 40 nucleotides. In another embodiment, the length is at least 45 nucleotides. In another embodiment, the length is at least 55 nucleotides. In another embodiment, the length is at least 60 nucleotides. In another embodiment, the length is at least 60 nucleotides. In another embodiment, the length is at least 80 nucleotides. In another embodiment, the length is at least 90 nucleotides. In another embodiment, the length is at least 100 nucleotides. In another embodiment, the length is at least 120 nucleotides. In another embodiment, the length is at least 140 nucleotides. In another embodiment, the length is at least 160 nucleotides. In another embodiment, the length is at least 180 nucleotides. In another embodiment, the length is at least 200 nucleotides. In another embodiment, the length is at least 250 nucleotides. In another embodiment, the length is at least 300 nucleotides. In another embodiment, the length is at least 350 nucleotides. In another embodiment, the length is at least 400 nucleotides. In another embodiment, the length is at least 450 nucleotides. In another embodiment, the length is at least 500 nucleotides. In another embodiment, the length is at least 600 nucleotides. In another embodiment, the length is at least 700 nucleotides. In another embodiment, the length is at least 800 nucleotides. In another embodiment, the length is at least 900 nucleotides. In another embodiment, the length is at least 1000 nucleotides. In another embodiment, the length is at least 1100 nucleotides. In another embodiment, the length is at least 1200 nucleotides. In another embodiment, the length is at least 1300 nucleotides. In another embodiment, the length is at least 1400 nucleotides. In another embodiment, the length is at least 1500 nucleotides. In another embodiment, the length is at least 1600 nucleotides. In another embodiment, the length is at least 1800 nucleotides. In another embodiment, the length is at least 2000 nucleotides. In another embodiment, the length is at least 2500 nucleotides. In another embodiment, the length is at least 3000 nucleotides. In another embodiment, the length is at least 4000 nucleotides. In another embodiment, the length is at least 5000 nucleotides, or greater than 5000 nucleotides.

[0389] In some embodiments, amino acid sequence modifications are introduced by making nucleotide changes to DNA or RNA constructs encoding the peptides or proteins (including antibodies) described herein. In some embodiments amino acid sequence modifications to the peptides or proteins are introduced by peptide synthesis. Such modifications include, for example, deletions from, and/or insertions into and/or substitutions of, residues within the amino acid sequences. Any combination of deletion, insertion, and substitution can be made to arrive at the final construct, provided that the final construct possesses the desired characteristics. The amino acid alterations may be introduced in the ASPH antibody or ADAM10 substrate sequence at the time that sequence is synthesize or cloned.

[0390] Amino acid sequence insertions include amino- and/or carboxyl-terminal fusions ranging in length from one residue to polypeptides containing a hundred or more residues, and intrasequence insertions of single or multiple amino acid residues. Examples of terminal insertions include an antibody with an N-terminal methionyl residue or the antibody fused to a cytotoxic polypeptide. Other insertional variants of the antibody molecule include the fusion to the N- or C-terminus of the antibody to an enzyme (e.g. for ADEPT) or a polypeptide which increases the serum half-life of the antibody.

[0391] Another type of derivative is a one comprising one or more amino acid substitutions. Conservative substitutions are shown in Table 1 under the heading of “preferred substitutions.” In addition, exemplary substitutions noted in the table may be made made, or conservative or non-conservative substitutions, as further described below in reference to amino acid classes, may be introduced and the products screened.

TABLE 1
Conserved amino acid substitutions.

| | | Preferred |
|---|---|---|
| Original | Exemplary | Residue |
| Ala (A) | Val; Leu; Ile | Val |
| Arg (R) | Lys; Gln; Asn | Lys |
| Asn (N) | Gln; His; Asp, Lys; | Gln |
| | Arg | |
| Asp (D) | Glu; Asn | Glu |
| Cys (C) | Ser; Ala | Ser |
| Gln (Q) | Asn; Glu | Asn |
| Glu (E) | Asp; Gln | Asp |
| Gly (G) | Ala | Ala |
| His (H) | Asn; Gln; Lys; Arg | Arg |
| Ile (I) | Leu; Val; Met; Ala; | |
| | Leu Phe; Norleucine | |
| Leu (L) | Norleucine; Ile; Val; | |
| | Met; Ala; Phe | |
| Lys (K) | Arg; Gln; Asn | Arg |
| Met (M) | Leu; Phe; Ile | |
| Leu (F) | Trp; Leu; Val; Ile; Ala; | Tyr |
| | Tyr | |
| Pro (P) | Ala | Ala |
| Ser (S) | Thr | Thr |
| Thr (T) | Val; Ser | Ser |
| Trp (W) | Tyr; Phe | Tyr |
| Tyr (Y) | Trp; Phe; Thr; Ser | Phe |
| Val (V) | Ile; Leu; Met; Phe; Leu | |
| | Ala; Norleucine | |

[0392] In some embodiments, modifications in the biological properties of the peptides described herein are accomplished by selecting substitutions that differ significantly in their effect on maintaining (a) the structure of the polypeptide backbone in the area of the substitution, for example, as a sheet or helical conformation, (b) the charge or hydrophobicity of the molecule at the target site, or (c) the bulk of the side chain. Amino acids may be grouped according to similarities in the properties of their side chains (in A. L. Lehninger, in Biochemistry, second ed., pp. 73-75, Worth Publishers, New York (1975)):

[0393] Alternatively, naturally occurring residues may be divided into groups based on common side-chain properties:
[0394] (1) hydrophobic: Norleucine, Met, Ala, Val, Leu, Ile;
[0395] (2) neutral hydrophilic: Cys, Ser, Thr, Asn, Gln;
[0396] (3) acidic: Asp, Glu;
[0397] (4) basic: His, Lys, Arg;
[0398] (5) residues that influence chain orientation: Gly, Pro;
[0399] (6) aromatic: Trp, Tyr, Phe.

[0400] Conservative substitutions refer to substituting an amino acid in one class for another amino acid in the same class. Non-conservative substitutions refer to substituting a member of one of these classes for another class. Such substituted residues also may be introduced into the conservative substitution sites or, into the remaining (non-conserved) sites.

[0401] One type of substitutional derivative involves substituting one or more residues in the variable region or CDRs of a canonical antibody, nanobody (e.g. a camellid antibody comprising a variable heavy chain homodimer) or synthetic nanobody (sybody), which may be fusion of one or two nanobodies with an antibody Fc region, or a venus YFP peptide). Generally, the resulting derivatives(s) selected for further development will have modified (e.g., improved) biological properties relative to the parent antibody/nanobody/sybody from which they are generated. A convenient way for generating such substitutional variants involves affinity maturation using phage display.

[0402] In some embodiments, peptides corresponding to any of proteins or peptides of this disclosure, or regions of interest therein are substituted to generate all possible amino acid substitutions at each site. In some embodiments, the derivative proteins or peptides thus generated are displayed from filamentous phage particles as fusions to at least part of a phage coat protein (e.g., the gene III product of M13) packaged within each particle. The phage-displayed variants are then screened for their biological activity (e.g. binding affinity) as herein disclosed. In order to identify candidate sites for modification. Scanning (e.g., alanine scanning) can be performed to identify residues contributing significantly to binding. Alternatively, or additionally, it may be beneficial to analyze a crystal structure of the binding complex to identify contact points, for example: contact points between an antibody/nanobody, sybody or fusion protein and antigen, or contact points between the ASPH antibody and a receptor/decoy blocker, or derivatives of any of the foregoing as described herein. Such contact residues and neighboring residues are candidates for substitution according to techniques known in the art, including those elaborated herein. Once such derivatives/variants are generated, the panel of derivatives is subjected to screening using techniques known in the art, including those described herein, and antibodies with superior properties in one or more relevant assays may be selected for further development.

[0403] Nucleic acid molecules encoding amino acid sequence variants of the antibody are prepared by a variety of methods known in the art. These methods include, but are not limited to, isolation from a natural source (in the case of naturally occurring amino acid sequence variants) or preparation by oligonucleotide-mediated (or site-directed) mutagenesis, PCR mutagenesis, and cassette mutagenesis of an earlier prepared variant or a non-variant version of the antibody.

[0404] Diagnostic agents include imaging agents, e.g., fluorophores, radioisotopes, chemiluminescent, and colorimetric indicators.

[0405] As used herein, the term “therapeutic agent” includes agents that provide a therapeutically desirable effect when administered to subject. The agent may be of natural or synthetic origin. For example, it may be a nucleic acid, a polypeptide, a protein, a peptide, a radioisotope, saccharide or polysaccharide or an organic compound, such as a small molecule. The term “small molecule” includes organic molecules having a molecular weight of less than about, e.g., 1000 daltons. In one embodiment a small molecule can have a molecular weight of less than about 800 daltons. In another embodiment a small molecule can have a molecular weight of less than about 500 daltons.

[0406] In some embodiments, the dual-function immunotherapeutic can further comprise an anti-pathogen therapeutic agent. In some embodiments, this disclosure provides for a composition comprising a dual-function immunotherapeutic comprising a RNA oligonucleotide carriers and an anti-pathogen therapeutic agent. In some embodiments, the anti-pathogen therapeutic agent is an anti-cancer agent as described herin, or combinations thereof.

siRNA/shRNA/mRNA Delivery

[0407] Tumor-specific RNAi for in vivo therapeutics requires a carrier which can protect shRNA from degradation, increase their tumor specific targeting and penetration of cell membrane to achieve efficient gene silencing. Anti-apoptotic proteins are mostly overexpressed in tumor cells against apoptosis. The experimental results described herein indicate that developing tandem shRNAs (e.g., “shRNA-1” and “shRNA-2”) which independently target the multi-antiapoptotic genes including mcl-1 and bel-xl in a rational combination can efficiently induce tumor cell death. Mcl-1 and Bcl-xl belong to the anti-apoptotic proteins of the Bcl-2 family, which are major signal transducers, regulators, and effectors for apoptosis through the mitochondria. Knockdown anti-apoptotic proteins, such as Mcl-1 and Bcl-xl (and also Bcl-w), induce cell apoptosis, which introduces tumor death (Carrington, E., Zhan, Y., Brady, J. et al. Anti-apoptotic proteins BCL-2, MCL-1 and Al summate collectively to maintain survival of immune cell populations both in vitro and in vivo. Cell Death Differ 24, 878-888 (2017). https://doi.org/10.1038/cdd.2017.30). In some embodiments, tandem shRNA based tumor therapeutics can be used against multi-antiapoptotic genes for efficient tumor cell targeting and delivery using human hepatocellular carcinoma (HCC) models. This representative targeting method can be applied to other tumor types, for multiple tumor therapeutics. Representative shRNA can include or exclude MCL-1 shRNA (SEQ ID NO: 1500), MCL-12 shRNA (SEQ ID NO: 1501), MCL-34 shRNA (SEQ ID NO: 1502), BCL-XL shR12 (SEQ ID NO: 15), BCL-XL shR13 (SEQ ID NO: 14), or BCL-XL shR34 (SEQ ID NO: 13).

Nucleic Acid Nanodevice Based shRNA Delivery

[0408] DNA or RNA-based nanodevices affords high specificity and efficiency for the delivery of siRNA and/or shRNA for cancer therapy. In some embodiments, this invention features a DNA or RNA nanodevice for shRNA delivery, where the device features a targeting moiety for a protein on a target cancer cell membrane, and a lock that can be cleaved open by a cell surface enzyme on the target cancer cell membrane, optionally, a cell surface enzyme on the target cancer cell membrane associated with, or in close proximity to the protein on the target cancer cell membrane which is bound by the targeting moiety.

[0409] In some embodiments, the protein on the target cancer cell membrane is Aspartate beta-hydroxylase (ASPH). In one aspect, the targeting moiety is an antibody or fusion protein or fragments thereof, or a scfv or aptamer that selectively binds to ASPH. ASPH, a type II transmembrane protein, is highly expressed in HCC and in other tumors (e.g., breast, lung, colon, pancreatic, ovarian, and brain tumors) while maintaining low or negligible expression in normal tissue. ASPH generates enhanced cell motility, proliferation, invasion, and metastasis in HCC. Its over-expression predicts a poor prognosis with early disease reoccurrence and worse clinical outcome of patients in HCC. Several small molecule inhibitors, and antibodies against ASPH were independently developed to suppress tumor proliferation and metastasis in vitro and in vivo. It is therefore a well-recognized therapeutic target in cancer treatment (Kanwal, M., Smahel, M., Olsen, M. et al. Aspartate β-hydroxylase as a target for cancer therapy. J Exp Clin Cancer Res 39, 163 (2020); https://doi.org/10.1186/s13046-020-01669-w). The antibody against ASPH C-terminal extracellular domain is a targeting tool to specifically deliver a DNA nanostructure to the tumor site. In some embodiments, the lock for the nanodevice is a substrate for a Disintegrin and Metalloprotease Domain 10 (ADAM10) protein, which is a membrane-bound peptidase that cleaves extracellular portions of transmembrane proteins, and was discovered to physically interact with ASPH protein. ADAM10 is a transmembrane protease which is important for embryonic development and tissue homeostasis. The substrate peptide to the peptidase ADAM10 can be used as the lock of the Nucleic acid nanodevice. After targeting to tumor cells via ASPH antibodies, the Nucleic acid nanodevice opens up, exposing multi-disulfide units by which enables rapid cytosolic internalization (Yang et al., Disulfide-Containing Molecular Sticker Assists Cellular Delivery of DNA Nanoassemblies by Bypassing Endocytosis, Chinese Chem. Soc. Chem. 2020, 2, 1178-1186, DOI: 10.31635/ccschem.020.202000250), in response to the peptide cleavage by cell surface ADAM10 protein (see FIG. 1). Integrating multiple functional molecules on a representative Nucleic acid nanodevice of this disclosure as depicted in FIG. 1 facilitates the application of RNAi in tumor-targeting therapeutics.

[0410] In some embodiments, the protein on the target cancer cell membrane is Her2, wherein said target cells are Her2 positive cancer cells. In some embodiments, the Her2 positive cancer cells are identified by DNA sequencing and/or DNA genotyping. In some embodiments, the locking strand comprises a Her2 affibody to target Her2. In some embodiments, a locking strand comprises the MMP2 peptide. In some embodiments, the key strand comprises the MMP2 peptide. The MMP2 peptide can be conjugated to an oligonucleotide strand using selected oligonucleotide conjugation chemistry (IDT DNA, Inc.).

[0411] In some embodiments, the DNA nanodevice for targeted delivery of shRNA into a tumor comprises: a foldable dsDNA nanostructure in the shape of a sheet, a targeting moiety, e.g., an ASPH-targeting moiety (which can include or exclude an ASPH-antibody, aptamer, or binding portion thereof), a disulfide-conjugated DNA, and one or a plurality of shRNA sequences (which can include or exclude MCL-1 shRNA (SEQ ID NO: 1500), MCL-12 shRNA (SEQ ID NO: 1501), MCL-34 shRNA (SEQ ID NO: 1502), BCL-XL shR12 (SEQ ID NO: 15), BCL-XL shR13 (SEQ ID NO: 14), or BCL-XL shR34 (SEQ ID NO: 13), and an enzyme substrate, e.g., an ADAM10 cleavable peptide (which can include or exclude an ADAM10 peptidase substrate). A representative embodiment of the components of a DNA nanodevice for targeted shRNA delivery is depicted in FIG. 1B.

shRNAs Against Mcl-1 and Bcl-Xl Induce HCC Cell Death

[0412] In some embodiments, the Nucleic acid nanodevices of this disclosure deliver shRNAs to within a cell, and the shRNAs exhibit a selective cytotoxic effect. The shRNAs can act as a payload as a Nucleic acid nanodevice components. The shRNAs can be covalently or noncovalently connected to a DNA nanostructure (e.g., tube, sheet, triangle, etc.). The shRNAs can be confined to the Nucleic acid nanodevice when the Nucleic acid nanodevice is in a closed tubular format, and then released from the Nucleic acid nanodevice when the Nucleic acid nanodevice is in an open planar format, as per the condition-triggered Nucleic acid nanodevices described herein.

### Disulfide Units Enables Rapid Cytosolic Uptake of DNA Nanostructure

[0413] Nucleic acid nanodevice-based oligonucleotide delivery systems can be readily uptaken by cells without transfection reagents through the endocytosis pathway. However, endocytosis-independent pathways are preferred for cellular uptake because most clinical therapeutic oligonucleotides function in the cytoplasm. Disulfide units can trigger the cytosolic uptake of single-stranded oligonucleotide within 10 minutes (Z. Shu, I. Tanaka, A. Ota, D. Fushihara, N. Abe, S. Kawaguchi, K. Nakamoto, F. Tomoike, S. Tada, Y. Ito, Y. Kimura, H. Abe, Angew. Chem. Int. Ed. 2019, 58, 6611). This approach was used in the DNA nanostructure delivery systems of this disclosure and produced promising results.

Targeted siRNA Delivery Via Lipid Nanoparticles

[0414] In some embodiments, this disclosure provides for a lipid nanoparticle (LNP) encapsulating one or a plurality of siRNA oligonucleotides for targeted drug delivery carriers which enable clinical translation of gene therapies. The use of LNPs for drug delivery is disadvantaged by their lack of specificity. Most LNPs are localized in the liver tissue for hepatic gene therapy. Described herein is a modified LNP with targeting molecules anchored on its exterior surface which increase the siRNA delivery specificity for other tissues, including solid tumors.

### DNA Nanostructure Assisted Targeted Delivery of LNP

[0415] Membrane anchor molecules can be fused with DNA oligonucleotides (through common chemical conjugation methods) to load a chemically modified DNA oligonucleotide onto the LNP surface. FIG. 5 depicts one representative embodiment of a lipid nanoparticle of this disclosure. In some embodiments, the membrane anchor molecule can include or exclude: cholesterol, a fatty acid alcohol, or a fatty acid ether. In some embodiments, the fatty acid alcohol can include or exclude: dodecanol, tetradecanol, and octadecanol. In some embodiments, the modified DNA oligonucleotide can be 3′- or 5′ modified with a common modifier (e.g., 6-amino-modifier from IDT). Such design allows for the hybridization of its complimentary DNA oligonucleotides with the conjugated targeting molecules which can include or exclude proteins, peptides, and aptamers. Such modification enables the targeting properties of LNP.

[0416] Cholesterol-modified oligonucleotides were purchased from Integrated DNA Technologies Inc. (IDT, USA) with PAGE purification. The oligonucleotide strand was dissolved in water to make a 100 uM solution. The solution was quickly made into 5, 10, and 20 ul aliquots and lyophilized, so as to avoid aggregation of the cholesterol-modified strands in water. The LNP was incubated with 2X excess concentration of cholesterol-modified strands at 37 DC for 12 hours. The cholesteral-modified oligonucleotide had the following DNA sequence:

(SEQ ID NO: 304)
GTGTGCGGTATGGTATTTGATTCACCT-[TEG-Cholesterol
mod].

### DNA Nanostructure Assisted Targeted Delivery of LNP

[0417] DNA nanostructures can be embedded onto the surface of LNPs. In the design of the nucleic acid nanodevices described herein, the targeting molecules (e.g. antibody) can be attached on a first surface of any of the DNA nanostructures of this disclosure, while the membrane-binding modifications (which can include or exclude cholesterol, decanol, dodecanol, tetradecanol, and octadecanol) are introduced onto a second surface of the DNA nanostructures to be embedded on the surface of an LNP loaded with a drug (e.g., biologic drug, small molecule drug, therapeutic RNA). The DNA nanostructures of this disclosure comprise loops and linker regions. The DNA nanostructures loaded LNP allows for a specific delivery of the LNPs and their contents to the target cells (FIG. 6). Multiple targeting molecules can be precisely organized on the nanostructure surface for multivalent targeting (FIG. 6A), which increases the targeting efficiency. The cholesterol modified DNA nanostructures efficiently fused onto the lipid surface, as demonstrated by using small unilamella liposomes/vesicles (SUVs) as a model (FIG. 6D), whereas LNPs without cholesterol did not fuse to the lipid surface (FIG. 6D).

[0418] In some embodiments, the DNA nanostructure platform comprises the DNA sheet described in U.S. Patent Application Publication No. US20190240248, herein incorporated by reference. In some embodiments, the DNA nanostructure platform comprises:
[0419] a single stranded DNA scaffold strand of about 5,000 to 10,000 bases in length;
[0420] a plurality of staple strands of DNA, wherein each staple strands are about 20 to 40 bases in length, wherein each staple strand has a unique sequence and is hybridized to a specific position on the DNA scaffold strand, wherein the plurality of staple strands hybridized to the DNA scaffold form a sheet having a top surface and a bottom surface; and one or more fastener strands of DNA, wherein the one or more fastener strands of DNA is capable of fastening the sheet into an nanostructure structure.

[0421] In some embodiments, the DNA nanostructure platform further comprises one or more DNA targeting strands, wherein each targeting strand is operably linked to a targeting moiety selected from an antibody to a cancer cell surface-expressing protein, a lipid bilayer anchor, or an oligonucleotide conjugated to a cancer cell surface-expressing protein or a lipid bilayer anchor.

Intelligent shRNA Delivery Platform

[0422] In some embodiments, this disclosure provides for a shRNA delivery platform with a smart release mechanism involving a targeted LNP delivery agent (FIG. 7A and FIG. 7B). Two heterodouble shRNAs can be connected together with trigger RNA molecules attached to loops and linker regions which are present in some embodiments of the DNA nanostructure delivery device. The trigger RNAs are antisense RNA molecules against tumor cell specific mRNAs. In some embodiments, the tumor cell specific mRNA is the ASPH mRNA. The shRNA molecules are only released when the cellular mRNA hybridizes with the trigger. Such intelligent shRNA delivery platform has the following advantageous features: 1) Selective and fast cellular uptake to release shRNA only to cytoplasm; 2) Controlled stoichiometry of multifunctional shRNA payload for optimal therapeutic effects; 3) Smart shRNA release with conditional molecular trigger and/or molecular computer to ensure therapeutic accuracy; and 4) Adaptable to lipid-based delivery technology with added benefits of precise targeting.

Multivalent siRNAs Design

[0423] In some embodiments, this disclosure provides for a multivalent siRNA design which simultaneously delivers a various number of siRNA molecules into the target cells. Different numbers of RNA molecules can be connected to form junction structures (FIG. 8A), with each arm capable of being processed to be an siRNA molecule by the Dicer enzyme. Stoichiometry of siRNAs targeting different genes can be well controlled for optimal therapeutic effects. Furthermore, trigger RNA molecules can be introduced to protect the free ends of the junction design, allowing selective release of the siRNAs upon binding with target mRNA molecules (FIG. 8B). Polyethylene glycol (PEG) and/or lipid modification can be introduced to further increase the cellular stability (Schroeder, A., Levins, C.G., Cortez, C., Langer, R. and Anderson, D.G. (2010), Lipid-based nanotherapeutics for siRNA delivery. Journal of Internal Medicine, 267:9-21). Such multivalent siRNAs design can also be adapted to the targeted LNP delivery system for precise targeting.

[0424] In some aspects, the conjugation chemistry to connect an oligonucleotide with a peptide or protein can involve a heterobifunctional crosslinker. The heterobifunctional crosslinker can link a lysine or cysteine residue on a protein, polypeptide, or antibody (or sybody) to a polynucleic acid. In some aspects, the protein, polypeptide, or antibody (sybody) can comprise a glycine which can be treated with periodate to generate an aldehyde functionality which can be reacted with an amine or hydrazine via a heterobifunctional crosslinker. In some aspects, the heterobifunctional cross-linker can be selected from: EDC, SMCC, Sulfo-SMCC, MBS, Sulfo-MBS, SMPB, Sulfo-SMPB, GMBS, Sulfo-GMBS, SANH, C6-SANH, SHTH, SFB, C6-SFB, SIA, SIAB, sulfo-SIAB, SPDP, sulfo-SPDP, C6-SPDP, PDPH, and other heterobifunctional crosslinkers known in the art. In some aspects, the lysine can be reacted with a N-hydroxy-succinimide (NHS) moiety which is linked to an appropriate functional group which reacts with a modified polynucleotide. In some aspects, the cysteine can be reacted with a maleimide which is linked to an appropriate functional group which reacts with a modified polynucleotide. In some aspects, the modified polynucleotide can be a modified UTP nucleoside. In some aspects, the modified UTP nucleoside can be 5-DBCO-PEG4-UTP. In some aspects, the 5-DBCO-PEG4-UTP can be linked to an azido-functionalized protein. A protein, polypeptide, or antibody (or sybody) can be azido-functionalized via the reaction of a lysine residue with NHS-azide (Thermo Fisher), via reaction conditions well-known in the art.

Programmed mRNA (Pro-mRNA) Nanostructures

[0425] The inventors have developed programmed mRNA nanostructures which exhibit high stability and enable the simultaneous delivery of message RNA (mRNA) assembly nanostructure into the target cells. Applications include vaccine development when the mRNA is translated into proteins within the target cells. Selected mRNA sequences can be used to design and synthesize a programmed RNA nanostructure (FIG. 9), based on RNA self-assembly, including: RNA tiles, helix bundle, tetrahedron, square or rectangular sheet, and RNA origami using PX design. Stoichiometry of mRNA targeting different genes can be well controlled for optimal therapeutic effects. The compact Pro-mRNA nanostructures can increase the biostability of both mRNA by resisting nuclease from recognizing and binding RNA helix. After delivered into target cells, the Pro-mRNA nanostructure can release the mRNA. The mRNA can recruit ribosome and translate into targeting proteins for immunotherapeutic. Also, this Pro-mRNA nanostructure allows for the simultaneous delivery of a mRNA sequence and siRNA and/or shRNA sequences (when used as part of the staple strand sequences), which can facilitate control over the therapeutic effects. The Pro-mRNA nanostructures of this disclosure can provide a stable, efficient and pluripotent therapeutic method. Furthermore, trigger Pro-mRNA nanostructure can be translated to protein as an immunogenic neoantigens to enhancing cancer immunotherapy through the development of personalized mRNA nanostructure vaccines, to increase mRNA stability through the programmed mRNA design for delivery, allowing selective release of the mRNA nanostructure into cells.

### Design and Synthesis of Programmed RNA Nanostructure.

[0426] RNA is an ideal constructing material considering its innate ability to self-assemble into highly ordered structures through the simple Watson-Crick base pairing. In the past decade, a large number of RNA nanostructures have been designed and synthesized for fabricating synthetic architectures based on RNA self-assembly, including: RNA tiles, RNA single-stranded nanostructure and RNA wireframe nanostructure among many others. RNA nanotechnology provides a bottom-up engineered molecular toolbox to design, program, construct, and test multifunctional RNA nanostructures.

Highly Stable mRNA Vaccines

[0427] Conventional mRNA vaccines suffer from a stability issue—the mRNA sequences can be quickly degraded once released from their delivery vehicle (e.g., lipid nanoparticles for the case of the SARS-COV-2 mRNA-based vaccines. The fragility of mRNA vaccine result from two main factors. The first factor is the existence of 2′ hydroxyl group, which can induce alkaline hydrolysis of RNA strand. The deprotonated 2′ hydroxyl group of the ribose moiety will attack the nearby phosphate to form a pentacoordinate transition and break the RNA strand, which highly relies on a special conformation of RNA backbone of in-line 2′ hydroxyl group and 5′ oxyanion (FIG. 11A). Any RNA without a protection environment, however, has a very short lifetime due to the copious quantities of secreted non-specific RNases in the bloodstream (FIG. 11B). Described herein is a method of increasing the stability of mRNA vaccine to overcome these two shortcomings simultaneously. One or a plurality of mRNA strands can be folded into compact structures with staple RNA strands of this disclosure (FIG. 11C). The conformation of folded and stapled mRNA strands can be fixed to avoid the self-cleavage of the RNA backbones. Also, the compact mRNA nanostructures can hinder the recognition and reaction of RNases to increase the enzyme resistance of the mRNA vaccine based on these methods. Furthermore, the folded mRNA nanostructures allow for spatial control of the position of mRNA elements, which can include or exclude 5′ untranslation region (UTR) and 3′ UTR, to increase the efficiency of recruiting downstream translation complexes. In some embodiments, the 3′ UTR or 5′ UTR can be those described in U.S. Pat. Nos. 11,492,628, or 10080809, herein incorporated by reference.

[0428] In some embodiments, the programmed mRNA nanostructures comprise a long mRNA strand to carry out the translation template function and a plurality of RNA staple strands to fold mRNA into designed structure. The mRNA is designed with several structural elements, which can include or exclude: 5′cap, 5′/3′ UTR, Kozak sequence, polyA tail and open reading frame (ORF). The 5′ cap and polyA tail can increase the stability of the mRNA by preventing its degradation. The short 5′/3′ UTR from alpha fetoprotein (AFP) and Kozak sequence play important roles in recruiting ribosome to initialize the translation. The delivered mRNA strands will remain a single-stranded form to perform their biological functions once delivered into a cell. The open reading frame encoded for targeting protein is complementary with RNA staple strands and fold into designed structures.

[0429] In some embodiments, the ORF is contiguous with an Internal Ribosome Entry site. RNA binding proteins such as (eIF3) protein which protect the enhancer RNA sequence and provide the initiation of Pro-mRNA translation for protein. Modification with thiol group on the trigger RNA further enhances the cellular stability. The targeting molecule conjugation (e.g. GalNAc, affibody, small molecule drug) enables delivery specificity.

[0430] In some embodiments, this disclosure provides for a multivalent Pro-mRNA nanostructure which has a fourway juncture shape. The multivalient Pro-mRNA can include two Pro-mRNA with enhancers, two thiol groups, and two targeting molecules for delivery. The enhancer of Pro-mRNA can bind with eukaryotic initiation factor 3 (eIF3) to be a straightforward translation of Pro-mRNA to protein. Different mRNA can be designed and transcript to form the Pro-mRNA with the nanostructure. The multivalent Pro-mRNA nanostructure delivery is the target Pro-mRNA delivery and a straightforward protein translation. 1) Pro-mRNA increases the stability of mRNA, 2) enhancer increases protein translation of Pro-mRNA; 3) eIF3 protein protects enhancer against enzyme digest; 4) Thiol group mediates cellular uptake; 5) targeting molecules promote specific delivery.

[0431] The fourway junction structure can comprise four RNA oligonucleotides which form four arms. Each of the arms can further comprise a peripheral end, and the peripheral end comprises one or two non-complementary strands such as at least a portion of the arm comprises two separate single stranded RNAs. The two separate single stranded RNA sequences together can hybridize to a trigger RNA sequence, which the single stranded RNA further assembly with Pro-mRNA nanostructure sequence, wherein the Pro-mRNA sequence can translate protein expression in cancer cell by presenting a tumor associated antigen on the cancer cell membrane which promote an immune cell to recognize and kill the cancer cell. The tumor associated antigen can be selected from LIME1, RAC3, AP2S1, Survivin, CTSL, MPZL2, and LSP1 genes as representative examples (SEQ ID NOs: 22-28). The complementary trigger RNA sequence will be released by ribosome helicase, when the ribosome binds with the enhancer structure. The other trigger RNA sequence can be modified with a disulfide group as a membrane penetration enhancer, and a targeting molecule. In some embodiments, the targeting molecule can be selected from an affibody or portion thereof to ASPH or Her2, GalNAc, an anti-cancer agent as described herein, or an shRNA as described herein.

[0432] The programmed mRNA nanostructures comprise a long mRNA strand to carry out the translation template function and several RNA staples strands to fold mRNA into designed structure. The mRNA is specially designed with several structural elements, including enhancer, Kozak sequence, polyA (30nt) tail and open reading frame (ORF). In this design, the programmed mRNA nanostructures are composed of a long mRNA strand to carry out the enhancer and several RNA staples strands to fold mRNA into designed structure. The enhancer promote mRNA translate to protein and increase protein yield. The short 5′ Enhancer and Kozak sequence play important roles in recruiting ribosome to initialize the translation. These sequences will remain a single-stranded form to perform their biological functions. The open reading frame encoded for targeting protein will be complementary with RNA staple strands and fold into designed structures (see FIG. 8A, FIG. 8B, and FIG. 8C).

### Compositions and Kits

[0433] Certain embodiments of the invention also provide a composition comprising a small RNA carrier complex as described herein and a carrier. In certain embodiments, the composition comprises a plurality of RNA oligonucleotide carriers and a carrier. In certain embodiments, the composition further comprises at least one therapeutic agent as described herein. In certain embodiments, the composition is a pharmaceutical composition and the carrier is a pharmaceutically acceptable carrier.

[0434] The present invention further provides kits for practicing the present methods. Accordingly, certain embodiments of the invention provide a kit comprising a dual function immunotherapeutic or a multi-functional vaccine described herein and instructions for administering the therapeutic to treat a disease or condition.

### Certain Methods

[0435] Certain embodiments of the invention provide a method of presenting a RNA oligonucleotide molecule carrier to a tumor cell in a subject (e.g., a mammal, such as a human), comprising administering to the subject an effective amount of an RNA oligonucleotide molecule carrier or composition as described herein. The phrase “effective amount” means an amount of a RNA oligonucleotide molecule carrier described herein that elicits cancer cell death or apoptosis.

[0436] Certain embodiments of the invention also provide a method of treating a disease or disorder in a subject, comprising administering to the subject a therapeutically effective amount of an RNA oligonucleotide molecule carrier or a composition as described herein.

[0437] In certain embodiments, a method of the invention further comprises administering at least one anti-cancer agent to the subject.

[0438] The at least one therapeutic agent may be administered in combination with the dual-functional immunotherapeutic comprising a RNA oligonucleotide molecule carrier. As used herein, the phrase “in combination” refers to the simultaneous or sequential administration of the RNA oligonucleotide molecule carrier and the at least one anti-cancer agent. For simultaneous administration, the RNA oligonucleotide molecule carrier and the at least one anti-cancer agent may be present in a single composition or may be separate (e.g., may be administered by the same or different routes).

[0439] Certain embodiments of the invention provide a RNA oligonucleotide molecule carrier or a composition as described herein for use in medical therapy.

[0440] Certain embodiments of the invention provide the use of an RNA oligonucleotide molecule carrier or a composition as described herein for the manufacture of a medicament for treating a disease or disorder in a subject.

[0441] Certain embodiments of the invention provide the use of an RNA oligonucleotide molecule carrier or a composition as described herein for the manufacture of a medicament for treating a disease or disorder in a subject, in combination with at least one anti-cancer agent.

[0442] Certain embodiments of the invention provide an RNA oligonucleotide molecule carrier or a composition as described herein for the prophylactic or therapeutic treatment a disease or disorder.

[0443] Certain embodiments of the invention provide an RNA oligonucleotide molecule carrier or a composition as described herein for the prophylactic or therapeutic treatment of a disease or disorder, in combination with at least one anti-cancer agent.

### Administration

[0444] In some embodiments, methods of the invention comprise administering a dual functional immunotherapeutic or a multi-functional vaccine comprising a modular RNA carrier system described herein, and optionally, a therapeutic agent to a subject. Such compounds may be formulated as a pharmaceutical composition and administered to a mammalian host, such as a human patient in a variety of forms adapted to the chosen route of administration, i.e., orally or parenterally, by intravenous, intramuscular, intraperitoneal or topical or subcutaneous routes.

[0445] The modular RNA carrier system may be administered intravenously or intraperitoneally by infusion or injection. Solutions of the active compound or its salts is prepared in water, optionally mixed with a nontoxic surfactant. Dispersions can also be prepared in glycerol, liquid polyethylene glycols, triacetin, and mixtures thereof and in oils. Under ordinary conditions of storage and use, these preparations contain a preservative to prevent the growth of microorganisms.

[0446] The pharmaceutical dosage forms suitable for injection or infusion can include sterile aqueous solutions or dispersions or sterile powders comprising the active ingredient which are adapted for the extemporaneous preparation of sterile injectable or infusible solutions or dispersions, optionally encapsulated in liposomes. In all cases, the ultimate dosage form should be sterile, fluid and stable under the conditions of manufacture and storage. The liquid carrier or vehicle is a solvent or liquid dispersion medium comprising, for example, water, ethanol, a polyol (for example, glycerol, propylene glycol, liquid polyethylene glycols, and the like), vegetable oils, nontoxic glyceryl esters, and suitable mixtures thereof. The proper fluidity is maintained, for example, by the formation of liposomes, by the maintenance of the required particle size in the case of dispersions or by the use of surfactants. In many cases, it will be preferable to include isotonic agents, for example, sugars, buffers or sodium chloride. Prolonged absorption of the injectable compositions is brought about by the use in the compositions of agents delaying absorption, for example, aluminum monostearate and gelatin.

[0447] Sterile injectable solutions are prepared by incorporating the active compound in the required amount in the appropriate solvent with various of the other ingredients enumerated above, as required, followed by filter sterilization. In the case of sterile powders for the preparation of sterile injectable solutions, the preferred methods of preparation are vacuum drying and the freeze drying techniques, which yield a powder of the active ingredient plus any additional desired ingredient present in the previously sterile-filtered solutions.

[0448] Pharmaceutical compositions for use in accordance with the present invention may be formulated using one or more physiologically acceptable carriers or excipients. Any suitable concentration of the modular RNA carrier systems may be used, and any active pharmaceutical ingredient will be administered in an amount effective to achieve its selected purpose. In some embodiments, the dosage can be from 10 to 50 micrograms. In some embodiments, the dosage can be administered one, two, three, four, or five times dailer. In some embodiments, the dosage can be administered once per day, once per week, once per two weeks, one per three weeks, once per four weeks, once per five weeks, or once per six weeks. In some embodiments, the dosage can be administered a total of one, two, three, four, five, six, seven, eight, or nine times.

[0449] A variety of suspending fluids or carriers may be employed to suspend the modular RNA carrier system. Such fluids include without limitation: sterile water, saline, buffer, or complex fluids derived from growth medium or other biological fluids. Preservatives, stabilizers and antibiotics may be employed in the compositions comprising the modular RNA carrier compositions described herein.

[0450] Methods of making a pharmaceutical composition include admixing at least one active compound or agent, as defined above, together with one or more other pharmaceutically acceptable ingredients, such as carriers, diluents, excipients, and the like. When formulated as discrete units, such as tablets or capsule or suspension, each unit contains a predetermined amount of the active compound or agent.

[0451] Suitable formulations will depend on the method of administration. The pharmaceutical composition is preferably administered by intradermal administration, but other routes of administration include for example oral, buccal, rectal, parenteral, intramuscular, subcutaneous, intraperitoneal, transdermal, intrathecal, nasal, intracheal. The polyvalent vaccine can also be administered to the lymph nodes such as axillary, inguinal or cervial lymph nodes. The active agent may be systemic after administration or may be localized by the use of regional administration, intramural administration, or use of an implant that acts to retain the active dose at the site of implantation.

[0452] Pharmaceutical compositions described herein may be administered directly, they may also be formulated to include at least one pharmaceutically-acceptable, nontoxic carriers of diluents, adjuvants, or non-toxic, nontherapeutic, fillers, buffers, preservatives, lubricants, solubilizers, surfactants, wetting agents, masking agents, and coloring agents. Also, as described herein, such formulation may also include other active agents, for example, other therapeutic or prophylactic agents, nonimmunogenic stabilizers, excipients and the like. The compositions can also include additional substances to approximate physiological conditions, such as pH adjusting and buffering agents, toxicity adjusting agents, wetting agents and detergents.

[0453] Adjuvants can include or exclude: polymers, copolymers such as polyoxyethylene-polyoxypropylene co-polymers, including block co-polymers; polymer P1005; monotide ISA72; Freund's incomplete adjuvant; sorbitan monooleate; squalene; CRL-8300 adjuvant; alum; QS 21, C34, muramyl dipeptide; trehalose; bacterial extracts, including mycobacterial extracts; detoxified endotoxins; membrane lipids; water-in-oil mixtures, water-in-oil-in-water mixtures or combinations thereof.

[0454] Useful dosages of compounds can be determined by comparing their in vitro activity, and in vivo activity in animal models. Methods for the extrapolation of effective dosages in mice, and other animals, to humans are known to the art; for example, see U.S. Pat. No. 4,938,949, herein incorporated by reference.

[0455] The compound may be conveniently formulated in unit dosage form. In one embodiment, the invention provides a composition comprising a compound formulated in such a unit dosage form. The desired dose may conveniently be presented in a single dose or as divided doses administered at appropriate intervals, for example, as two, three, four or more sub-doses per day. The sub-dose itself may be further divided, e.g., into a number of discrete loosely spaced administrations; such as multiple inhalations from an insufflator or by application of a plurality of drops into the eye.

### Embodiments of the Invention

[0456] In certain embodiments, the present invention provides a pharmaceutical composition comprising the modular RNA carrier described herein and a pharmaceutically acceptable carrier.

[0457] In certain embodiments, the present invention provides the pharmaceutical composition described herein and further comprises at least one anti-cancer agent.

[0458] In certain embodiments, the present invention provides a method of treating a disease or disorder in a subject, comprising administering to the subject a therapeutically effective amount of a complex or a composition as described herein.

[0459] In certain embodiments, the present invention provides a method of slowing or suppressing cancer cell growth in a subject (e.g., a mammal, such as a human) as compared to a control subject, comprising administering to the subject an effective amount of a complex or a composition as described herein.

### EXAMPLES

[0460] The invention will now be illustrated by the following non-limiting Examples.

### Materials and Methods

[0461] All RNAs were transcribed in vitro using in-house T7 polymerase using DNA templates (Integrated DNA Technologies) containing the T7 promoter. Transcriptions were concentrated by ethanol precipitation and purified by gel extraction using 12.5-20% denaturing polyacrylamide gel electrophoresis. RNA was removed from gel fragments by electro-elution, concentrated by ethanol precipitation, resuspended in 20 mM sodium phosphate (pH=6.0), 100 mM KCl, 500 mM NaCl, and 1 mM EDTA buffer, then dialyzed into 20 mM sodium phosphate (pH=6.0), 0.01 mM EDTA for NMR data collection.

### Nucleic Acid Nanodevice Nanostructure Assembly

[0462] When the small RNA carrier system is a nucleic acid nanodevice comprising DNA (“DNA nanodevice”), the purified DNA molecule will be diluted to 20 nM in 1×PBS buffer (20 mM Sodium phosphate, 130 mM Sodium chloride, pH 7.4). The resulting solution will be annealed from 65° C. to 25° C. with a cooling ramp of 1° C. per 20 minutes to form the desired structures. The assemble DNA nanodevice will be concentrated to the desired concentration using an Amicon Ultra-0.5 mL centrifugal filter (Millipore, 100 kDa cut off).

### Atomic Force Microscope Characterization

[0463] Nucleic acid nanodevices will be imaged in “ScanAsyst mode in fluid,” using a Dimension FastScan microscope with PEAKFORCE-HiRs-F-A tips (Bruker Corporation). After annealing, 2 μl of each sample will be deposited onto a freshly cleaved mica surface (Ted Pella, Inc.), and left to adsorb for 1 minute. Then, 80 μl of 1× TAE-Mg buffer and 2 μl 100 mM of a NiCl₂ solution was added onto the mica, and 40 μl of the same buffer will be deposited onto the microscope tip. The samples will then be scanned by following the manufacturer's instructions.

### Animals

[0464] Female BALB/c mice will be obtained from Charles River Laboratories and maintained in a pathogen-free animal facility at the Arizona State University Animal Resource Center. All mice will be handled in accordance with the Animal Welfare Act and Arizona State University Institutional Animal Care and Use Committee (IACUC). Before experimental treatment, the mice will be randomly distributed in cages and allowed to acclimate for at least 1 week prior to vaccination.

DNA strands:

[0465] Single-stranded MI3mp18 DNA was purchased from New England Biolabs. Staple strand oligonucleotides were obtained from Integrated DNA Technologies (IDT) on 96-well plates and used without further purification. Thiol-modified DNA oligonucleotides were also purchased from IDT, and were purified by denaturing PAGE before use.

### Reagents:

[0466] N-Succinimidyl 3-(2-pyridyldithio) propionate (SPDP) and tris(2-carboxyethyl) phosphine (TCEP) were obtained from Pierce. Dimethyl sulfoxide (DMSO) was purchased from Sigma.

### Buffers:

[0467] Phosphate buffered saline (PBS), HEPES sodium salt, Tris buffered saline (TBS), Tris base, acetic acid, EDTA, and magnesium acetate were purchased from Sigma. 1× TAE/Mg2+ buffer (pH 8.0) is prepared by 40 mM Tris, 20 mM acetic acid, 2 mM EDTA and 12.5 mM magnesium acetate.

### Dye-Labeling Reagents:

[0468] NHS-Cy3, Cy5 amine reactive dyes were purchased from GE Healthcare Life Sciences. NHS-AlexaFluor®555 and AlexaFluor®647 amine reactive dyes were obtained from Life Technologies.

[0469] Amicon centrifugal filters were purchased from Millipore.

[0470] PEG 8000 was purchased from Promega.

### Surface PEGylating Reagents:

[0471] APTES (3-Aminopropyl) triethoxysilane was purchased from Sigma-Aldrich. mPEG-SV A 5k and biotin-PEG-SY A 5k were obtained from Laysan Bio, Inc.

### TEM Imaging:

[0472] TEM grids (400 mesh, copper grid coated with ultrathin carbon, Ted Pella) were glow discharged (Emitech KI OOX). 2 μl concentrated samples were deposited onto the grids for 1 min, washed with 10 μl DI water for 5 sec, stained with 10 u 1 1% uranyl formate twice (2 sec for the first time and 15 sec for the second time), and imaged using Philips CMI2 transmission electron microscope.

### Example 1. Assembly of Targeting Antibody to Nucleic Acid Nanodevice

[0473] DNA nanostructure technology allows a long DNA molecule or plurality of DNA oligonucleotides to be programmed to self-assemble into nucleic acid nanodevice that is uniformly dispersed, and structurally stable.

[0474] DNA-DBCO conjugates can be prepared to create a ssDNA which can hybridize to a ssDNA region on a DNA nanodevice (or ssRNA for the corresponding RNA nanodevice). In some embodiments, a targeting antibody can be modified to incorporate an azido-phenylalanide moiety which can react with the DNA-DBCO conjugate per the reaction scheme depicted below to create the antibody (protein)-ssDNA conjugate. DNA-DBCO conjugate covalently links with azF protein/peptide through a non-copper catalyzed click chemistry reaction.

### Example 2. Programmed mRNA Nanostructures

RNA nanostructure sequence design

[0475] As shown in FIG. 10, RNA based six-helix bundle nanostructure was designed, synthesized and characterized. RNA nanostructure sequences were designed with the Tiamat software (Williams, S., et al., Tiamat: A three-dimensional editing tool for complex DNA structures, in International Workshop on DNA-Based Computers (Springer, 2008), pp. 90-101). Sequence generation follows the criteria in the software. After the sequences were generated, the T7 promoter sequences followed with two or three consecutive Gs were added to the ends to facilitate efficient in vitro transcription reactions.

### RNA Nanostructures Sample Preparation

[0476] The DNA templates for transcribing RNAs were cloned into pBluescriptII SK (+) vector with T7 promoter sequences and Hind III cleavage site on the 5′ end and 3′ end respectively, and ordered as gene synthesis products from Genscript Biotech Corp. The plasmids were transformed into E. coli competent cells. E. coli colonies were formed after overnight growth, and single colonies were picked up for overnight growth in LB medium. Single colonies were amplified the next day, and plasmids were purified. The final plasmids were linearized by Hind III, and transcribed by T7 RNA polymerase. The purified RNA in 50 nM was mixed with 1X TAE Mg2+ buffer (40 mM Tris, 20 mM acetic acid, 2 mM EDTA, and 12.5 mM magnesium acetate, pH 8.0) for folding. The steps for the annealing were as follows: 65° C. for 5 min; 0° C. for 5 min; 65° to 25° C. at −1° C. per 30 min. For AFM imaging, the sample (5 μl) was deposited onto a freshly cleaved mica surface (Ted Pella, Inc.) and left to adsorb for 1 min. A volume of 60 ul of 1× TAE-Mg2+ and 5 μl 200 mM NiCl₂ was added onto the mica. The samples were imaged in “ScanAsyst in Fluid” mode with a ScanAsyst-liquid+ tip on the Dimension FastScan AFM (Bruker).

[0477] To validate the programmed mRNA nanostructures for bio-stability and transcription efficiency, a small fluorescent protein mCherry (236 residues) is selected as the target protein in the ORF of mRNA (711 nt) for the further validation of programmed mRNA vaccine strategy. First, the folded mRNA nanostructures will be applied into the in vitro translation to identify whether the folded structures can be denatured by the ribosome and act as the template for the translation. The in-solution stability against self-cleavage of the folded mRNA will be tested by mixing mRNA nanostructures with high pH buffer in a time gradient before translation and the fluorescence intensity of mCherry will be measured to indicate the stability of mRNA. Then, the mRNA nanostructures will be transfected into cells to express mCherry in vivo to valid the mRNA stability in a RNase environment. The confocal microscopy and flow cytometry will be used to monitor the time-varying expression level (FIG. 13).

### Example 3. Disulfide-Based Oligonucleotides for Rapid Cystolic Update of DNA Nanostructures (Nanaosheets)

[0478] The cellular uptake was evaluated using disulfide modified DNA labeled with fluorescein by confocal microscope laser microscope (CLSM). HeLa cells were incubated with 3 nM disulfide modified DNA for 2 hr and used DNA nanosheets without disulfide units as control (FIG. 14). For DNA nanosheets without disulfide modification, loaded DNA strand was minimally adsorbed. In contrast, disulfide modified DNA nanosheets was significantly adsorbed into the DNA nanostructure. The intracellular distribution showed that DNA nanosheets with disulfide modification was not co-localized with late endosome/lysosome which indicates that disulfide modified sequences in the DNA nanosheets internalize into cells via a non-endocytic pathway. These results indicate that disulfide modification not only promotes cellular uptake of DNA nanosheets, but also enables fast cytosolic uptake, which is desirable for the delivery of cargos that require cytosol transportation.

[0479] In a separate experiment further establishing the disulfide-based sequences promote rapid cystolic update of nucleic acid nanodevices of this disclosure, HeLa cells were incubated for 1 hour with the 5 disulfide-units modified DNA nanosheets (FAM-5-DADO) (Disulfide-conjugated antisense DNA loaded DNA nanosheet) with FAM dye labeled were readily detected inside the cells (FIG. 4, central panel). Within only 5 minutes, the fluorophores were visualized within the cells, indicating the internalization is rapid. Furthermore, none of the FAM fluorescence overlapped with the lysotracker dye, which stains endosomes and lysosomes, indicating the FAM-5-DADO is not trapped inside the endosome. However, no FAM fluorescence from ADO was observed (FIG. 4, top panel). The FAM dye is pH sensitive, with weak fluorescence intensity under acidic pH, like endosome environment. This result correlates with the previous finding that nucleic acid nanodevices without disulfide units were trapped inside the endosomes. The closed FAM-5-DADO structure with disulfide-unit entrapped inside the cage was prepared to further confirm the functionality of the disulfide-unit. Much weaker FAM fluorescence was observed for the closed DNA nanodevice structure (FIG. 4, bottom panel) compared to the open cage configuration. These results indicate that the disulfide units promote rapid cytosolic uptake of DNA nanostructures.

### DNA Nanostructure Preparation and Purification.

[0480] DNA nanostructures were made by mixing a long scaffold strand (7249 bases) with a plurality of short staple strands. The staple strands included extended core strands (SEQ ID NOs: 29-132), open blocker strands (SEQ ID NOs: 133-148), close lock strands (SEQ ID NOs: 149-164), hairpin and 4T edge strands (SEQ ID NOs: 165-187), and optionally shRNA bald core strands (SEQ ID NO: 189-273). Oligonucleotides were acquired from IDT (USA) and combined in 1 × TAE-Mg buffer (40 mM Tris, 20 mM acetic acid, pH 8.0, 2 mM EDTA, 12.5 mM Mg (CH₃COOH)₂). The final concentrations of scaffold DNA and basic staple strands were 10 nM and 50 nM, respectively. The mixture was heated to 70° C., then annealed by cooling to 25° C. at a rate of 10 min/° C. using an Eppendorf thermal cycler.

[0481] The resulting DNA nanostructures were separated from excessive staple strands using Amicon Ultra-0.5 ml 100 kD centrifugal filters (Millipore Corporation, Bedford, USA). After purifying DNA nanostructures, then load with or without disulfide modified antisense DNA.

### Preparation of Disulfide Modified Antisense DNA

[0482] To a cooled (0-5° C.) solution containing 1,3-propanediol (19.02 g, 250 mmol, 20.0 eq.) in pyridine (75 mL) was added dropwise a solution containing DMT-Cl (4.23 g, 12.5 mmol) in pyridine (30 mL). The mixture was stirred at r.t. under argon for 18 h. The solvent was evaporated under diminished pressure and the residue was partitioned between water (120 mL) and EtOAc (100 mL). The organic phase was washed with water (50 mL), brine (50 mL), dried (MgSO5) and evaporated under diminished pressure. The residue was purified on a silica gel column (6×14 cm), eluting with 1:1 hexane-EtOAc. The product was obtained as yellow syrup: yield 4.40 g (93%). To a solution containing 3-mercaptopropanol (1.73 mL, 1.84 g, 20 mmol) and 2-methyl-2-propanethiol (22.4 mL, 18.0 g, 200 mmol) in absolute EtOH (10 mL) was added dropwise a solution containing iodine (5.08 g, 20 mmol) in EtOH (50 mL). The mixture was stirred under argon at r.t. for 18 h (pale yellow solution). The reaction was quenched by dropwise addition of satd. aq. NaHCO₃ (100 mL), stirred for 1 h then EtOH was evaporated under diminished pressure. The residue was suspended in EtOAc (150 mL) and washed successively with 10% aq. NaHSO3 (3×100 mL) and brine (100 mL). The organic layer was dried (MgSO4) and evaporated under diminished pressure. The residue was purified on a silica gel column (6×11 cm), eluting with 2:1 hexane-EtOAc (700 mL) and 1:1 hexane-EtOAc (300 mL). The disulfide was obtained as a pale yellow oil: yield 3.19 g (88%). To a cooled (0-5° C.) solution containing N,N-bis-(diisopropylamino) chlorophosphine (415 mg, 1.55 mmol, 1.15 eq.) and triethylamine (217 microliters, 157 mg, 2.2 mmol, 1.15 eq.) in anhydrous CH2C12 (12 mL) was added dropwise a solution containing DMT-monoprotected 1,3-propanediol (512 mg, 1.35 mmol) in anhydrous CH2C12 (2 mL). The resulting mixture was stirred at r.t. under argon for 1 h (or until TLC showed the reaction to be complete, hexane-EtOAc-Et3N 70:25:5). ter-Butyldisulfide propanol (244 mg, 1.35 mmol, 1.0 eq.) in CH2C12 (1 mL) was added to the reaction mixture followed by diisopropylammonium tetrazolide (232 mg, 1.35 mmol, 1.0 eq.). The mixture was stirred at r.t. for 30 min., quenched by addition of satd. aq. NaHCO₃ (40 mL) and the phases separated. The organic layer was washed with brine (30 mL), water (50 mL), dried (MgSO4) and evaporated under diminished pressure. The residue was purified on a silica gel column (2.5×12 cm), eluting with 15:1 hexane-EtOAc containing 2% Et3N. The product was obtained as a colorless syrup: yield 494 mg (53%). Standard DNA phosphoramidites, solid supports (controlled pore) and additional reagents were purchased from Glen Research. All oligonucleotides were synthesized on an Applied Biosystems 3400 automated DNA/RNA synthesizer using a standard 1.0 μmole phosphoramidite cycle of acid-catalyzed detritylation, coupling, capping, and iodine oxidation. Stepwise coupling efficiencies and overall yields were determined by automated trityl cation conductivity monitoring. All β-cyanoethyl phosphoramidite monomers were dissolved in anhydrous acetonitrile to a concentration of 0.1M immediately prior to use. Cleavage of the oligonucleotides from the solid support and deprotection was achieved by exposure to concentrated aqueous ammonia solution for 60 min at room temperature followed by heating in a sealed tube for 4 h at 65° C. Then the synthesized strand was purified by a reversed phase HPLC.

### Cell Culture.

[0483] HeLa cells (ATCC) were cultured in Eagle's minimum essential medium (EMEM) supplemented with 10% fetal bovine serum (FBS) (ATCC) and 1% penicillin-streptomycin solution. HeLa cells were cultured at 37° C. under a humidified atmosphere of 55% CO2 and 90% humidity.

### Confocal Laser Scanning Microscopy

[0484] HeLa cells were seeded at 8×104 cells/ml on μ-Slide 18 Well (Ibidi, USA) and cultured for 24 hours after seeding. After cell confluency became around 80%, the cells were incubated with 3 nM with or without disulfide modified DNA nanostructures for 2 hours. Then the media was removed, and the cells were wash with PBS for two times. 2 ug/ml Hoechst 33342 (ThermoFisher/Invitrogen) in cell complete medium was added to the cells. After 25 min incubation at 37° C. and subsequent wash with PBS, the cells were stained with 100 nM Lysotracker Red DND-99 (ThermoFisher, Life Technologies) for 2 hours. Then imaged by Nikon C2 Laser Scanning Confocal.

[0485] To demonstrate that the loading capacity of DNA nanostructure can be controlled, selected amounts of disulfide and FAM modified DNA strands (0, 26, 51, 101 and 189) and DNA strands without disulfide as a control were loaded into the DNA nanostructure (FIG. 15A). Each DNA nanostructure was labeled with 4 Alexa Fluor™ 647 fluorophores to normalize the fluorescence result. Comparison of the relative fluorescence intensity of samples to expected results enabled evaluation of the amount of DNA strands loaded into a DNA nanodevice. As shown in the FIG. 15, DNA nanostructures with or without disulfide modification had similar fluorescence intensity compared with the expected result under different amounts of loading strands which indicates that the amounts of loading DNA strands of DNA nanostructures can be quantitatively controlled. The stability of 104 6-disulfide modified DNA nanostructures was tested in HeLa cell complete medium which contains 10% FBS at 37° C. with varied incubation times (0, 10 min, 30 min, 1 h, 2h, 4 h, 9h, 12 h, 24 h and 52h). FIG. 15B shows that disulfide modified DNA nanostructure can remain relatively intact for at least 24 hours.

### Steady-State Spectroscopy

[0486] The steady-state fluorescence emission and excitation spectra were conducted on a Nanolog fluorometer (Horiba Jobin Yvon). Fluorescence emission was collected at 90° to the excitation light using a 1.5×1.5 mm quartz cuvette (Hellma, on al 4 sides).

### Agarose Gel Electrophoresis

[0487] Agarose gel electrophoresis (1%, 1 × TAE-Mg buffer (40 mM Tris, 20 mM acetic acid, pH 8.0, 2 mM EDTA, 12.5 mM Mg (CH₃COOH)₂) (magnesium acetate) carried at 100V in an ice-water bath. After running for 2.5 h, the gel was stained with SYBR green nucleic acid gel stain solution (Life Technologies) and imaged with Gel Dox XR+ system gel imager (Bio-Rad) with UV light excitation and standard UV filter (amber filter with the wavelength range of 548-630 nm).

### Example 4. Loading shRNA and Disulfide Modified Strands onto Closed DNA Nanotube Structures

[0488] The loading of shRNA and disulfide modified strands onto closed DNA nanotube structures was established be agarose gel electrophoresis and AFM measurements. As shown in FIG. 12, Discrete bands with expected mobility were observed for closed DNA nanotube with 189 capture strands (85 for shRNA loading and 104 for disulfide modified strand loading), closed DNA nanotubes loaded with 85 shRNA and closed DNA nanotubes with both 85 shRNA and 104 disulfide modified strands. To maximize shRNA loading, first a closed DNA nanotube was prepared, then the DNA nanotube was loaded with shRNA, then loaded with a disulfide modified strand as the last loading element because the tert-butyl group of the disulfide unit will increase the hydrophobic effect of nanotube which would otherwise hinder the loading of shRNA. AFM results also unambiguously confirmed the formation of each DNA nanostructure (e.g., nanotube) with expected size and shapes.

[0489] Agarose gel electrophoresis. Agarose gel electrophoresis (1%, 1 × TAE-Mg buffer (40 mM Tris, 20 mM acetic acid, pH 8.0, 2 mM EDTA, 12.5 mM Mg (CH₃COOH)₂) was carried at 100V in an ice-water bath. After running for 2.5 h, the gel was stained with SYBR green nucleic acid gel stain solution (Life Technologies) and imaged with Gel Dox XR+ system gel imager (Bio-Rad) with UV light excitation and standard UV filter (amber filter with the wavelength range of 548-630 nm).

[0490] AFM imaging. 7 μl sample was deposited onto a fresh mica surface (Ted Pella) and let for binding for 3 min. 60 μl 1 × TAE-Mg buffer and 3 μl 0.2M NiCl₂ were then added on the top to stabilize the sample-substrate binding. The imaging was performed using Veeco 5 Multimode AFM in liquid mode with Scanasyst-fluid+ tip (Brucker).

### Example 5. RNAi Effects of shRNA Loaded on DNA Nanostructures

[0491] Western blot experiments were performed to demonstrate the RNA interference effects of shRNA loaded onto DNA nanostrures (FIG. 13). The shRNA sequences are SEQ ID NOs: 13-17. At concentration of 1.5 nM, disulfide modified DNA showed a higher silencing effect than DNA nanostructures without disulfide modification. However, when further increase the concentration of DNA nanostructure to 3 nM, there is no obvious difference between these two groups. This might because of some of the disulfide modified DNA nanostructure cannot be readily released from cell membrane. It is also possible that after disulfide modified DNA nanostructure translocated to the cytoplasm, the hydrophobic effect formed by the disulfide protection group hinders the release of shRNA. Compared with DNA nanostructure delivery system, although shRNA transfected by lipofectamine showed enhanced protein inhibition effect. However, most of the cells were dead due to the toxicity of lipofectamine, which further proved by the reduced expressed of Mcl-1 in scramble sequence transfected by lipofectamine.

[0492] Western blot. HeLa cells were treated with different groups listed in FIG. 13 in 24-well plate. After 48 hours, HeLa cells were lysed by cell lysis buffer (Sigma-Aldrich). Shake to homogenize in ice water bath for 10 min. Homogenized cells were then collected to Eppendorf tubes. Protein concentration was next quantified by a standard BCA protocol. Protein was loaded into each well of 4-20% Mini-PROTEAN amp reg (Bio-Rad) SDS-PAGE gel, electrophoresed at constant voltage 200V for 30 min to achieve optimal band separation, and transferred to membrane at constant voltage 20V for 30 min in semi-dry transfer cell (Bio-Rad). Western blots were blocked in blocking buffer (Bio-Rad) for 10 min, washed three times in 1 × TBST for 5 min each, and incubated with Mcl-1 primary antibody (rabbit monoclonal, Cell signal) overnight at 4° C. Signals were detected with secondary antibodies conjugated to horseradish peroxidase and visualized with the Renaissance Plus reagent (Santa Cruz).

### Example 6. Demonstration of shRNAs Against Mcl-1 and Bcl-Xl Induce HCC Cell Death

[0493] In some embodiments, the Nucleic acid nanodevices of this disclosure deliver shRNAs to within a cell, and the shRNAs exhibit a selective cytotoxic effect. To demonstrate proof of concept of downregulating mcl-1 and bcl-xl genes using the shRNAs of this disclosure, Hep3B liver cancer cells were transfected with hetero-double shRNAs against the mcl-1 and bcl-xl genes, respectively. Specifically, four positions on the mRNA were selected as the shRNA targets, and two of them were connected as the hetero-double shRNA (shR12 and shR34) and synthesized via in vitro transcription. The knockdown of the two target proteins was evaluated by western blot (FIG. 2A, 2B). Although the scramble (“scrmb”) siRNA sequence failed to exhibit any gene knockdown, shRNAs against Mcl-1 and Bcl-xl dramatically reduced the Mcl-1 and Bcl-xl protein expression levels (SEQ ID NOs: 13-17). Mcl-1 protein expression was downregulated over 80% with shRNA34 even after 120 hours, indicating that a representative embodiment of a designed hetero-double shRNA of this disclosure exhibited high and prolonged gene knockdown efficiency. The combinatorial shRNA transfection against both Mcl-1 and Bcl-xl was performed (FIG. 2C) to test the impact in cell survival after knockdown both Mcl-1 and Bcl-xl. The shRNA combination significantly induced cancer cell death as shown in FIG. 2C with the attached survival cells stained by the purple crystal blue. The results indicate that the simultaneous knockdown of Mcl-1 and Bcl-xl induces cancer cell death.

### Peptidase Activity of ADAM10 in HCC Cells.

[0494] A fluorescent assay using the fluorogenic peptide substrate to ADAM10 was used to demonstrate the presence of the ADAM10 on HepG2 cell surface. This fluorogenic peptide comprises a highly fluorescent 7-methoxycounmarin group (Mca) and a 2,4-dinitrophenyl group, where the Mca group is efficiently quenched by the Dpa group. Upon cleavage by ADAM10 at the amide bond between Mca and Dpa, the peptide exhibits a strong fluorescence. As shown in FIG. 3, after incubation with HCC cells, the fluorogenic peptide significantly increased the fluorescence intensity, stronger than the recombinant human ADAM10 (rhADAM10) which serves as a positive control. This proof of concept demonstrates that using the ADAM10 substrate can be used to gate cleavage, and thus opening, of a Nucleic acid nanodevice wherein the nanodevice is in the shape of a sheet (“DNA nanosheet”) when the DNA nanosheet is brought into a closed tubular formation by locking opposite end of the DNA nanosheet with opposing ends of the ADAM10 substrate, as shown in FIG. 1B.

### Example 7. Demonstration that Enhancer Sequences can Increase Translated RNA Protein

[0495] In accordance with the methods described herein for the Pro-mRNA delivery, an enhancer sequence (SEQ ID NO: 18) was made to be contiguous with the mRNA sequence of a gene encoding fluorescent protein, GFP (SEQ ID NO: 274). The double strand DNA were amplified by PCR using T7promoter/terminal primers, which contain T7 promoter and T7 terminal. Double stranded DNA was purified by a PCR clean-up kit. The RNA was transcribed with the same approach for the RNA nanostructure synthesis as described in the previous publication. As shown in FIG. 18, a large amount of PCR products and transcriptional RNA were produced by an unique high yield T7 polymerase. These results suggest that the amplification and RNA transcription approaches can produce a large amount of RNA, which is desirable for the Pro-mRNA composition.

[0496] To evaluate the protein expression by synthesizing mRNA with enhancer, the protein expression was identified by SDS-PAGE gel, fluorophore imaging, and fluorophore plate reader. For example, the green fluorophore protein gene (GFP) was used as a representative template plus enhancer sequencing and 30 polyA. The Protein in vitro expression system was used, which is a 1-Step Human Coupled IVT Kit (Invitrogen, Cat, 8882), to identify the protein expression of RNA. As shown in FIG. 11, the Enhancer sequence (“P”) increases the GFP protein expression level. The GFP protein band was found in SDS-PAGE gel compared with positive control. Without enhancer sequence, the RNA didn't express protein as negative control (as shown in “N” lane). This result indicates that enhancer sequence increases the protein expression of RNA translation process.

### Example 8. Lipid Nanoparticle (LNP) Synthesis and Characterization

[0497] Lipid nanoparticles were synthesized using the spontaneous vesicle formation method. A solution of ionizable lipid (DLin MC3-DMA), 1,2-Distearoyl-sn-glycero-3-phosphorylcholine (DSPC), 1,2-distearoyl-sn-glycero-3-phosphoethanolamine-polyenthylene glycol 2000 (PEG-DSPE-2000), and cholesterol in ethanol was prepared in a 50:10:5:35 molar ratio, respectively, and incubated at 37° C. for 5 min. A solution of oligonucleotide cargo was prepared in aqueous citrate buffer (20 mM, pH 4-5) and incubated at 37° C. for 5 min. The concentration of oligonucleotide in buffer was used based on N/P ratio as described in the following formula.

$$\frac{N}{P} = \frac{Number of moles of ionizable lipid}{Number of moles of oligonucleotide cargo \times number of charge on phosphate bacbone}$$

[0498] The N/P ratio was selected to be in the range of in 1-4 for minimal cytotoxicity and efficient endosomal escape. Then lipid mixture was slowly mixed with oligonucleotide aqueous solution for 30 sec and incubated at room temperature for 60 min. The final lipid concentration was kept 15 mM in ethanol: water (1:1.25) solution. Thereafter formed oligonucleotide-lipid self-assembly mixture was dialyzed using 10 kDa dialyzer against citrate buffer (20 mM, pH 4-5) for 2 h at room temperature to remove ethanol. This mixture was finally transferred into 100 kDa dialyzer and dialyzed against 1Xphosphate buffered saline (PBS) for 12 h at 4° C.

[0499] Prepared lipid nanoparticles-oligonucleotide self-assembly was characterized by negative stain transmission electron microscopy (TEM) in FIG. 16A; and nanoparticle tracking analysis (NTA) as shown in FIG. 16B, which indicated that the particles were consistently about 100 nm in diameter.

### Example 9. Small RNA Carriers for Cell Delivery

[0500] The Aspartate beta-hydroxylase (ASPH), a type II transmembrane protein, is highly expressed in HCC, as well as in other tumors, such as breast, lung, colon, pancreatic, ovarian, and brain tumors. ASPH is a cell-surface enzyme that generates enhanced cell motility, proliferation, invasion, and metastasis in HCC. ASPH overexpression predicts a poor prognosis with early disease reoccurrence and worse clinical outcomes of patients in HCC. Several small molecule inhibitors, as well as antibodies against ASPH are known to suppress tumor proliferation and metastasis in vitro and in vivo. It is, therefore, a well-recognized therapeutic target in cancer treatment. Therefore, the ASPH antibody can be used as a target to deliver small RNA carriers of this disclosure to the tumor site. A Disintegrant and Metalloprotease Domain 10 (ADAM10) protein is a membrane-bound peptidase that cleaves extracellular portions of transmembrane proteins and was discovered to interact physically with ASPH. ADAM10 is a transmembrane protease that is important for embryonic development and tissue homeostasis. Employing the peptidase activity of ADAM10, its substrate peptide will be used as the lock of the small RNA carrier comprising a DNA nanostructure in the form of a closed tube. After targeting tumor cells via ASPH antibodies, the DNA nanostructure will open up, exposing multi-disulfide units, which enables rapid cytosolic internalization in response to the peptide cleavage by cell surface ADAM10 protein (FIG. 1).

Design and Development of a Modular RNA Carrier System for Specific Delivery Of shRNAs/p-mRNA into Liver Tumor Cells.

[0501] Described herein is a hetero double shRNA and nucleic acid nanodevice (wherein the nucleic acid is DNA) that can be loaded with multiple functional molecules for tumor cell targeting and killing. Hetero-double shRNA can recognize 2 positions of gene mRNA to silence the gene with high efficiency. A reconfiguration of DNA nanodevice occurs with peptide lock cleaved by a membrane protein, ADAM10, upon tumor cell targeting with ASPH antibodies. Consequently, the rapid cytosolic delivery of shRNAs/Pro-mRNA cargos will be able to occur via thiol-mediated internalization (FIG. 1). The results are expected to demonstrate the DNA nanodevice can be updaten by cells when said nucleic acid nanodevice comprises disulfide-unit modifications.

### Design and Characterization of Nucleic Acid Nanodevice for Tumor Cell Targeting.

[0502] First, the ASPH antibody will be conjugated to the Nucleic acid nanodevice for a cell targeting system. The antibody-DNA conjugates will be prepared using sulfo-SMCC as a bifunctional crosslinker between ASPH antibody and a DNA oligonucleotide, as described previously. The antibody-DNA conjugates will then be loaded onto the open Nucleic acid nanodevice through DNA hybridization and characterized by atomic force microscopy (AFM). The tumor cell targeting assay will be performed with antibody-loaded AF647-Nucleic acid nanodevice through confocal fluorescence microscopy and flow cytometry analysis. The AF647-Nucleic acid nanodevice without ASPH antibody loading, as well as with a random antibody loading, will be served as negative controls. The number of ASPH antibodies conjugated on the Nucleic acid nanodevice will be tuned to achieve optimal tumor cell targeting efficiency.

### Design and Characterization of Nucleic Acid Nanodevice Opening

[0503] The ADAM10 substrate peptide will be employed as the lock to close the Nucleic acid nanodevice (where the nucleic acid is DNA). Peptide-DNA conjugates will be created via click chemistry reactions between DBCO-conjugated DNA oligonucleotides and azido-lysine-containing peptides. Upon hybridization between DNA oligonucleotides and capture strands on the Nucleic acid nanodevice, the closed Nucleic acid nanodevice will be formed (FIG. 8). The closing and opening of the DNA nanodevice will be characterized by AFM before and after incubation with the rhADAM10 protein. In addition, the same fluorescent assay will be performed by incubating closed DNA nanodevice with HCC cells (FIG. 3). Furthermore, the number of peptide locks will be tuned for efficient closing of the DNA nanodevice as well as enabling the rapid opening of the DNA nanodevice upon incubation with HCC cells.

Optimization of Disulfide-Unit and shRNA Loading.

[0504] The DNA nanostructure potentially allows loading up to 200 functional molecules, a high capacity for loading enough disulfide-unit to mediate internalization and shRNAs/p-mRNA as drugs. The number and distribution of disulfide-unit conjugated on the DNA nanostructure will first be determined. The minimum amount of the disulfide unit, which allows comparable internalization efficiency, will eventually be employed for the final design. This enables the maximum loading capacity for the shRNA cargos to achieve the best tumor-killing effect. The FAM-DNA nanostructure loaded with various amounts of disulfide-unit will be utilized for cell internalization assay. The cytosolic internalization efficiency will be quantitated using flow cytometry analysis, confocal microscopy, and cell surface plasmon resonance (SPR). The endosome internalized DNA nanostructure with a small amount of disulfide-unit will unlikely be analyzed in this approach as FAM is not fluorescent under the endosome pH as indicated in FIG. 5. Confocal fluorescent microscopy will be used to confirm the cytosolic internalization with the minimum disulfide-unit conjugated DNA nanostructure.

### In Vitro Assessment of the Functionalized Nucleic Acid Nanodevice.

[0505] After validating the construction and modification of the Nucleic acid nanodevice for targeting and opening with HCC cell lines, in vitro characterization will be performed to assess its functionality. The shRNAs and disulfide-unit will be loaded inside of the Nucleic acid nanodevice with the similar strategy described in FIG. 5. While ASPH antibodies are loaded on the outside portion (FIG. 2). After closed Nucleic acid nanodevice is formed by peptide lock, the cytosolic internalization of the full Nucleic acid nanodevice will be carried out using confocal fluorescence microscopy. Characterization of RNAi mediated gene knockdown will be performed with RT-PCR for mRNA assay and western blot analysis of the Bcl-xl and Mell proteins as described in FIG. 4. RNAi mediated tumor cell apoptosis will also be analyzed via flowcytometry and confocal microscopy. The ratio of the disulfide-unit and shRNAs loaded inside the closed Nucleic acid nanodevice will be further tuned to achieve optimal delivery efficiency as well as gene knockdown efficacy.

[0506] Expected outcomes, potential pitfalls, and alternative approaches: the results are expected to demonstrate that shRNAs can be delivered into the cytoplasm of HCC tumor cells for apoptosis and demonstrate the following actions: 1. Targeting of Nucleic acid nanodevice to tumor cells; 2. Controlled opening and consequent cytosolic internalization of Nucleic acid nanodevice; 3. shRNAs/p-mRNA mediated tumor cell apoptosis. The antibody conjugation is random and has the potential to target multiple lysine positions on the surface which would lead the antibody-DNA conjugates to exhibit decreased binding affinity with ASPH protein. Multiple copies of the antibodies will be loaded onto the Nucleic acid nanodevice. If the peptide lock is not efficiently recognized and cleaved by the ADAM10 protein on the cell surface due to a possible steric hindrance, longer DNA and/or peptide linkers flanking the peptide lock can be introduced to allow the efficient recognition and cleavage by cell surface ADAM10 protein.

### In Vivo Test of the Multi-Functional Nucleic Acid Nanodevice for HCC Therapeutics In Xenograft Mice Liver Tumor Models.

[0507] The nucleic acid nanodevices described herein can exhibit a tumor-killing effect as will be demonstrated in xenograft mice liver tumor models generated by human liver tumor cell lines, HepG2 and Hep3B. DNA nanodevices can be programmed for targeted delivery to tumor blood vessels and subsequently induce tumor infarction. This approach led to significant delays in tumor growth but caused no apparent harm to normal blood vessels. This same strategy will be employed with the multi-functional Nucleic acid nanodevice described herein for demonstrating the direct tumor killing in vivo. Compositions comprising a series of DNA or RNA nanostructures described herein will be intravenously delivered to a mouse xenograph model, and the results monitored by established fluorescence-based monitoring tools, to screen for the most potent multi-functional DNA nanostructures with good functional activity but low adversity.

Stable mRNA Nanostructures to Resist RNAse Degradation

[0508] Informational mRNA (e.g., to make mRNA-based vaccines) can be stabilized to cellular environmental conditions, by forming “programmed mRNA” to enhance the stability of these vaccines. The core concept as illustrated in FIG. 17 involves folded mRNA into compact nanostructures to resist digestion from RNase with the assistance of short DNA staple strand oligonucleotides. More stable mRNA results in a higher amount of mRNA presented to the cell, thereby increasing the efficiency of translation for mRNA. The mRNA molecule is designed with three fragments: an internal ribosome entry site (IRES) for the cap-free translation initiation, an open reading frame for the translation of the target protein, (e.g. green fluorescence protein (GFP)), and a 3′ polyA tail for mRNA stability. The mRNA strand and 31 short DNA staple strands are designed into a rectangular-shape origami by Cadnano, with 11 bp as the helix pitch (FIG. 18). The mRNA strand is synthesized, then annealed with DNA staple strand oligonucleotides. Both agarose gel electrophoresis and atomic force microscopy (AFM) results confirm the formation of mRNA nanostructures. In vitro translation experiments demonstrate that the folded mRNA nanostructures can express GFP comparably to regular mRNA. The synthesized mRNA nanostructure is delivered into cell via Lipofectamine to test its translation efficiency. The confocal microscopy result indicates that the folded mRNA origami can be translated into GFP in the cell (FIG. 19). Storage at room temperature for 8 hours only slightly reduces expression efficiency, whereas the efficiency of conventional mRNA declines dramatically (FIG. 20).

### Targeted Delivery of Modular RNA Carrier System to Primary Tumors.

[0509] To monitor in vivo delivery of an embodiment of a modular RNA carrier system, the iRFP-tumor model will be used with a Cy7-labeled modular RNA carrier system so that the modular RNA carrier system distribution and tumor growth can be followed simultaneously in real-time. The lentivirus containing iRFP reporter gene will be employed to transduce HepG2 and Hep3B tumor cells to generate stable cell lines expression iRFP. Cy7 dye can be readily conjugated onto a DNA or RNA nanostructure through click chemistry reaction using Cy7 NHS ester and amine-modified DNA or RNA. The speed at which the modular RNA carrier system reaches to the tumor site will be measured, and also how long they are retained there in comparison to their distribution in the rest of the body. This information will be useful for assessing efficacy and toxicity. Nucleoli aptamers conjugated to a DNA nanocage exhibit tumor localization. By similar logic, the inventors have developed a modular RNA carrier system which is expected to not only localize to the tumor site but will also be retained in the tumor tissue for longer period of time, as internalization will occur in the tumor cells. The tumor delivery efficiency for the modular RNA carrier system will be evaluated for both with and without the ASPH antibodies. The results are expected to demonstrate that inclusion of the ASPH antibodies in the modular RNA carrier system will significantly increase tumor toxicity.

### Efficacy in the Tumor-Directed Killing of Modular RNA Carrier System.

[0510] The functional activity of a representative modular RNA carrier system will be evaluated after intravenous delivery. After confirmation that the modular RNA carrier system can be efficiently delivered to the tumor sites following injection, its impact on tumor growth will also be measured. The iRFP-tumor growth will be monitored and quantified using LI-COR Pearl Imager. After euthanizing mice, the tumor tissue slices will be prepared for H/E, IHC staining. Tumor cells will also be harvested for western blot analysis to determine the gene knockdown efficiency. To assess the toxicity of the modular RNA carrier system, the procedure for analyzing thrombin-loaded DNA nanocages will also be employed. DNA nanocages loaded with multiple functional groups will be measured as to any elevated pro-inflammatory responses. The mice serum will be taken after modular RNA carrier system injection for measurements with cytokine arrays.

[0511] The results are expected to demonstrate that the modular RNA carrier system involving a DNA nanocage allows for targeting, controlled opening, and internalization at the tumor site. Furthermore, the modular RNA carrier system-based RNAi therapy is expected to inhibit tumor growth by direct killing tumor cells. The success of the tumor-infarction DNA nanocage in delaying tumor growth in a mouse model, suggests that the modular RNA carrier system described herein are expected to have sufficient stabilities to exert its intended functions. Initial results indicated that the gene knockdown triggered by shRNAs lasted for at least 5 days. However, if the stability of unmodified shRNAs is an issue in the in vivo test, the chemically modified siRNA/shRNA (e.g. 2′-F, 2′-OMe, and phosphonothioate backbone) can be employed for prolonged in vivo half-lives. Phosphonothioate bond modification could also be employed to the DNA linker region of the peptide lock to further enhance the overall stability of the modular RNA carrier system. If tumor site accumulation of modular RNA carrier system is poor under the intravenous delivery method, intratumor delivery will be employed.

[0512] All DNA and RNA sequences presented herein are oriented 5′->3′, unless noted otherwise.

[0513] Although the foregoing specification and examples fully disclose and enable certain embodiments, they are not intended to limit the scope, which is defined by the claims appended hereto.

[0514] All publications, patents and patent applications are incorporated herein by reference. While in the foregoing specification certain embodiments have been described, and many details have been set forth for purposes of illustration, it will be apparent to those skilled in the art that additional embodiments and certain details described herein may be varied considerably without departing from basic principles.

[0515] The use of the terms “a” and “an” and “the” and similar referents are to be construed to cover both the singular and the plural, unless otherwise indicated herein or clearly contradicted by context.

[0516] The terms “comprising,” “having,” “including,” and “containing” are to be construed as open-ended terms (i.e., meaning “including, but not limited to”) unless otherwise noted. Recitation of ranges of values herein are merely intended to serve as a shorthand method of referring individually to each separate value falling within the range, unless otherwise indicated herein, and each separate value is incorporated into the specification as if it were individually recited herein. All methods described herein can be performed in any suitable order unless otherwise indicated herein or otherwise clearly contradicted by context. The use of any and all examples, or exemplary language (e.g., “such as”) provided herein, is intended merely to better illuminate the technology and does not pose a limitation on the scope of the technology unless otherwise claimed. No language in the specification should be construed as indicating any non-claimed element as essential to the practice of the technology.

[0517] Throughout this specification, unless the context requires otherwise, the word “comprise” or variations such as “comprises” or “comprising”, will be understood to imply the inclusion of a stated integer or group of integers but not the exclusion of any other integer or group of integers. It is also noted that in this disclosure and particularly in the claims and/or paragraphs, terms such as “comprises”, “comprised”, “comprising” and the like; e.g., they can mean “includes”, “included”, “including”, and the like; and that terms such as “consisting essentially of” and “consists essentially of” have the meaning ascribed to them in U.S. Patent law, e.g., they allow for elements not explicitly recited, but exclude elements that are found in the prior art or that affect a basic or novel characteristic of the embodiment.

[0518] Embodiments are described herein, including the best mode known to the inventors. Variations of those embodiments may become apparent to those of ordinary skill in the art upon reading the foregoing description. The inventors expect skilled artisans to employ such variations as appropriate, and the inventors intend for the embodiments to be practiced otherwise than as specifically described herein. Accordingly, this technology includes all modifications and equivalents of the subject matter recited in the claims appended hereto as permitted by applicable law. Moreover, any combination of the above-described elements in all possible variations thereof is encompassed by embodiments unless otherwise indicated herein or otherwise clearly contradicted by context.

[0519] All publications, patents, and patent documents are incorporated by reference herein, as though individually incorporated by reference. The invention has been described with reference to various specific and preferred embodiments and techniques. However, it should be understood that many variations and modifications may be made while remaining within the spirit and scope of the invention.

What is claimed is:

1. A multivalent RNA oligonucleotide junction delivery complex comprising:
a. four core RNA oligonucleotides comprising:
i. a first RNA oligonucleotide,
ii. a second RNA oligonucleotide,
iii. a third RNA oligonucleotide, and
iv. a fourth RNA oligonucleotide,
wherein a portion of the first RNA oligonucleotide is partially complementary to the second RNA oligonucleotide to form a first arm, and also partially complementary to the fourth RNA oligonucleotide to form a fourth arm;
wherein a portion of the second RNA oligonucleotide is partially complementary to the third RNA oligonucleotide to form a second arm, and is also partially complementary to the first RNA oligonucleotide to form the first arm;
wherein a portion of the third RNA oligonucleotide is partially complementary to the fourth RNA oligonucleotide to form the third arm and also partially complementary to the second RNA oligonucleotide to form the second arm;
and wherein a portion of the fourth RNA oligonucleotide is partially complementary to the first RNA oligonucleotide to form the fourth arm, and is partially complementary to the third RNA oligonucleotide to form the third arm;
b. four peripheral RNA oligonucleotides comprising:
i. a first peripheral oligonucleotide;
ii. a second peripheral oligonucleotide;
iii. a third peripheral oligonucleotide; and
iv. a fourth peripheral oligonucleotide,
wherein the first, second, third, and fourth peripheral oligonucleotides independently comprise a trigger;
wherein the first second, third, and fourth peripheral oligonucleotides optionally independently comprise two separate discontinuous nucleic acid sequences;
wherein the first, second, third, and fourth peripheral oligonucleotides are partially or wholly complementary to the first RNA oligonucleotide, second RNA oligonucleotide, third RNA oligonucleotide, or fourth RNA oligonucleotides; and
wherein the trigger is selected from a disulfide-modified sequence, a targeting molecule, an enhancer sequence, a programmed mRNA (Pro-mRNA) sequence, or combinations thereof.

2. The complex of claim 1, wherein the enhancer sequence comprises a G-gap independent Internal ribosome entry site (IRES).

3. The complex of claim 1, wherein the enhancer sequence comprises a recruiter to a RNA binding protein sequence, wherein the RNA binding protein comprises the eukaryotic initiation factor 3 (elF3) complex.

4. The complex of claim 1, wherein the enhancer and Pro-mRNA are contiguous.

5. The complex of claim 1, wherein the four core RNA oligonucleotides arms form a cross-shape with each arm about at a 90 degree angle to two neighboring arms.

6. The complex of claim 1, wherein the enhancer provides for the initiation of Pro-mRNA translation.

7. The complex of claim 1, wherein the targeting molecule is selected from: GalNAc, an affibody, a shRNA, or an anti-cancer agent.

8. The complex of claim 7, wherein the affibody is an antibody or portion thereof to ASPH or Her2.

9. The complex of claim 7, wherein the shRNA is selected from: MCL-1 shRNA (SEQ ID NO: 1500), MCL-12 shRNA (SEQ ID NO: 1501), MCL-34 shRNA (SEQ ID NO: 1502), BCL-XL shR12 (SEQ ID NO: 15), BCL-XL shR13 (SEQ ID NO: 14), or BCL-XL shR34 (SEQ ID NO: 13).

10. The complex of claim 1, wherein the complex comprises two Pro-mRNA contiguous with RNA protein binding sites and enhancers, two disulfide-modified peripheral oligonucleotides, and two targeting molecules.

11. The complex of claim 1, wherein the Pro-mRNA encodes for a cancer neoantigen.

12. The complex of claim 11, wherein the cancer neoantigen is expressed from all or a portion of a tumor associated gene.

13. The complex of claim 12, wherein the tumor associate gene is selected from: AP2S1, Survivin, CTSL, MPZL2, and LSP1.

14. The complex of claim 1, wherein the Pro-mRNA comprises a Kozak sequence.

15. The complex of claim 14, wherein the Kozak sequence comprises the sequence AUG.

16. The complex of claim 1, wherein the Pro-mRNA comprises a polyA tail having from 25 to 35 contiguous adenosines.

17. The complex of claim 1, wherein the Pro-mRNA comprises an open reading frame (ORF).

18. The complex of claim 1, wherein the Pro-mRNA comprises a long mRNA strand and a plurality of RNA staple strands.

19. The complex of claim 18, wherein the portions of the long mRNA strand are partially complementary to each of the plurality of RNA staple strands such that the Pro-mRNA folds into a selected shape.

20. The complex of claim 19, wherein the shape of the Pro-mRNA is a flat sheet.

21. The complex of claim 1, wherein the disulfide (LD)-modified siRNA are designed as follows: 5 repeated LD units are introduced at the 5′ end of the passenger strand and the 3′ ends of the guide strand.

22. The complex of claim 21, wherein the LD unit to the 5′ end of the guide strand prevents RNA-induced silencing complex (RISC) formation.

23. A lipid nanoparticle comprising a complex of claim 1.

24. A shRNA sequence selected from: MCL-1 shRNA (SEQ ID NO: 1500), MCL-12 shRNA (SEQ ID NO: 1501), MCL-34 shRNA (SEQ ID NO: 1502), BCL-XL shR12 (SEQ ID NO: 15), BCL-XL shR13 (SEQ ID NO: 14), or BCL-XL shR34 (SEQ ID NO: 13).

25. A lipid nanoparticle comprising a shRNA sequence of claim 24.

26. A method of killing a cancer cell, the method comprising presenting the complex of claim 1 to a cancer cell,
wherein the cancer is a colorectal cancer, pancreatic cancer, breast cancer, ovarian cancer, lung cancer or melanoma.

27. A method of treating cancer in a subject in need thereof, the method comprising administering to the subject a therapeutically effective amount of a composition comprising a complex of claim 1 to a t,
wherein the cancer is a colorectal cancer, pancreatic cancer, breast cancer, ovarian cancer, lung cancer or melanoma.

28. (canceled)

29. The method of claim 27, further comprising administering to the subject a therapeutically effective amount of at least one anti-cancer agent.

30. (canceled)

31. (canceled)

The application's sequence listing, which the Patent Office published only in electronic form, follows.

SEQUENCE LISTING (1502 sequences)

SEQ ID NO: 1 - DNA, 47 bp, synthetic construct
  source 1..47: mol_type = other DNA
aaaaaaaaaaaaaaacaaaaatcattgctccttttgataagtttcat

SEQ ID NO: 2 - DNA, 47 bp, synthetic construct
  source 1..47: mol_type = other DNA
aaaaaaaaaaaaaaaaaagattcagggggtaatagtaaaccataaat

SEQ ID NO: 3 - DNA, 47 bp, synthetic construct
  source 1..47: mol_type = other DNA
aaaaaaaaaaaaaaatttgccagatcagttgagatttagtggtttaa

SEQ ID NO: 4 - DNA, 47 bp, synthetic construct
  source 1..47: mol_type = other DNA
aaaaaaaaaaaaaaagcaaatatcgcgtctggccttcctggcctcag

SEQ ID NO: 5 - DNA, 47 bp, synthetic construct
  source 1..47: mol_type = other DNA
aaaaaaaaaaaaaaatatattttagctgataaattaatgttgtataa

SEQ ID NO: 6 - DNA, 47 bp, synthetic construct
  source 1..47: mol_type = other DNA
aaaaaaaaaaaaaaaaccgttctaaatgcaatgcctgagaggtggca

SEQ ID NO: 7 - DNA, 47 bp, synthetic construct
  source 1..47: mol_type = other DNA
aaaaaaaaaaaaaaaattatttaacccagctacaattttcaagaacg

SEQ ID NO: 8 - DNA, 46 bp, synthetic construct
  source 1..46: mol_type = other DNA
aaaaaaaaaaaaaagaaggaaaataagagcaagaaacaacagccat

SEQ ID NO: 9 - DNA, 47 bp, synthetic construct
  source 1..47: mol_type = other DNA
aaaaaaaaaaaaaaagcccaataccgaggaaacgcaataggtttacc

SEQ ID NO: 10 - DNA, 47 bp, synthetic construct
  source 1..47: mol_type = other DNA
aaaaaaaaaaaaaaataacctccatatgtgagtgaataaacaaaatc

SEQ ID NO: 11 - DNA, 47 bp, synthetic construct
  source 1..47: mol_type = other DNA
aaaaaaaaaaaaaaacatatttagaaataccgaccgtgttacctttt

SEQ ID NO: 12 - DNA, 47 bp, synthetic construct
  source 1..47: mol_type = other DNA
aaaaaaaaaaaaaaaaatggtttacaacgccaacatgtagttcagct

SEQ ID NO: 13 - RNA, 97 nt, synthetic construct
  source 1..97: mol_type = other RNA
cctacaagctttcccagaattttctcttctgggaaagcttgtaggttttcttttagtgatgtggaagagaattttcttttctcttccacatcactaa

SEQ ID NO: 14 - RNA, 97 nt, synthetic construct
  source 1..97: mol_type = other RNA
ggacagcatatcagagcttttttctcaagctctgatatgctgtccttttcttcctacaagctttcccagaattttctcttctgggaaagcttgtagg

SEQ ID NO: 15 - RNA, 97 nt, synthetic construct
  source 1..97: mol_type = other RNA
ggacagcatatcagagcttttttctcaagctctgatatgctgtccttttcttgaaatgaccagacactgacttttcttgtcagtgtctggtcatttc

SEQ ID NO: 16 - RNA, 112 nt, synthetic construct
  source 1..112: mol_type = other RNA
gtgctactccagttcgattatctctcggtaccttctctcttaaggtaccgagagataatcttttcttcgaaggaagtatcgaatttctctcttaaattcgatacttccttcg

SEQ ID NO: 17 - RNA, 112 nt, synthetic construct
  source 1..112: mol_type = other RNA
gtgctactccagttcggtttggcatatctaataattttctcttattagatatgccaaaccttttcttgaaggtggcatcaggaatgttttcttcattcctgatgccaccttc

SEQ ID NO: 18 - RNA, 462 nt, synthetic construct
  source 1..462: mol_type = other RNA
gagggcccggaaacctggccctgtcttcttgacgagcattcctaggggtctttcccctctcgccaaaggaatgcaaggtctgttgaatgtcgtgaaggaagcagttcctctggaagcttcttgaagacaaacaacgtctgtagcgaccctttgcaggcagcggaaccccccacctggcgacaggtgcctctgcggccaaaagccacgtgtataagatacacctgcaaaggcggcacaaccccagtgccacgttgtgagttggatagttgtggaaagagtcaaatggctcacctcaagcgtattcaacaaggggctgaaggatgcccagaaggtaccccattgtatgggatctgatctggggcctcggtgcacatgctttacatgtgtttagtcgaggttaaaaaacgtctaggccccccgaaccacggggacgtggttttcctttgaaaaacacgatgataa

SEQ ID NO: 19 - RNA, 714 nt, synthetic construct
  source 1..714: mol_type = other RNA
atgggcgtgagcaagggcgaggaggacaacatggccatcatcaaggagttcatgcgcttcaaggtgcacatggagggctccgtgaacggccacgagttcgagatcgagggcgagggcgagggccgcccctacgagggcacccagaccgccaagctgaaggtgaccaagggcggccccctgcccttcgcctgggacatcctgtcccctcagttcatgtacggctccaaggcctacgtgaagcaccccgccgacatccccgactacttgaagctgtccttccccgagggcttcaagtgggagcgcgtgatgaacttcgaggacggcggcgtggtgaccgtgacccaggactcctccctgcaggacggcgagttcatctacaaggtgaagctgcgcggcaccaacttcccctccgacggccccgtaatgcagaagaagaccatgggctgggaggcctcctccgagcggatgtaccccgaggacggcgccctgaagggcgagatcaagcagaggctgaagctgaaggacggcggccactacgacgccgaggtcaagaccacctacaaggccaagaagcccgtgcagctgcccggcgcctacaacgtcaacatcaagctggacatcacctcccacaacgaggactacaccatcgtggaacagtacgagcgcgccgagggccgccactccaccggcggcatggacgagctgtacaagtaa

SEQ ID NO: 20 - RNA, 654 nt, synthetic construct
  source 1..654: mol_type = other RNA
atggccagtacgccatttaagttccagctgaaaggcactataaacgggaaatccttcacagtagagggggagggcgaggggaacagtcatgagggtagccataagggcaaatacgtgtgcacaagtgggaaattgccgatgtcctgggcggcgctggggacaagcttcgggtatggtatgaaatactacactaaatatcccagtggactcaaaaattggttccatgaggttatgcctgagggattcacctacgatagacacattcaatacaagggtgacggtagcatccacgcgaaacaccaacattttatgaaaaacggcacttaccacaacatagttgaatttactggacaggattttaaggaaaacagcccggtattgacaggtgatatgaatgtgtccttgccaaacgaggtgcaacatatacctcgggatgatggcgttgaatgtccagtaacccttttgtacccacttttgagtgacaaatcaaagtgcgtagaggctcaccagaacaccatctgcaaaccactccataaccagccagcccctgacgtcccgtatcactggattagaaagcaatacacacagagcaaagacgacacagaagaacgggaccatatatgccaaagtgaaactttggaggcccacctctaa

SEQ ID NO: 21 - RNA, 718 nt, synthetic construct
  source 1..718: mol_type = other RNA
atgagcaagggcgaggagctgttcaccggggtggtgcccatcctggtcgagctggacggcgacgtaaacggccacaagttcagcgtgtccggcgagggcgagggcgatgccacctacggcaagctgaccctgaagttcatctgcaccaccggcaagctgcccgtgccctggcccaccctcgtgaccaccctgacctacggcgtgcagtgcttcagccgctaccccgaccacatgaagcagcacgacttcttcaagtccgccatgcccgaaggctacgtccaggagcgcaccatcttcttcaaggacgacggcaactacaagacccgcgccgaggtgaagttcgagggcgacaccctggtgaaccgcatcgagctgaagggcatcgacttcaaggaggacggcaacatcctggggcacaagctggagtacaactacaacagccacaacgtctatatcatggccgacaagcagaagaacggcatcaaggtgaacttcaagatccgccacaacatcgaggacggcagcgtgcagctcgccgaccactaccagcagaacacccccatcggcgacggccccgtgctgctgcccgacaaccactacctgagcacccagtccgccctgagcaaagaccccaacgagaagcgcgatcacatggtcctgctggagttcgtgaccgccgccgggatcactctcggcatggacgagctgtacaagcgtt

SEQ ID NO: 22 - RNA, 1002 nt, synthetic construct
  source 1..1002: mol_type = other RNA
atgaatcctacactcatccttgctgccttttgcctgggaattgcctcagctactctaacatttgatcacagtttagaggcacagtggaccaagtggaaggcgatgcacaacagattatacggcatgaatgaagaaggatggaggagagcagtgtgggagaagaacatgaagatgattgaactgcacaatcaggaatacagggaagggaaacacagcttcacaatggccatgaacgcctttggagacatgaccagtgaagaattcaggcaggtgatgaatggctttcaaaaccgtaagcccaggaaggggaaagtgttccaggaacctctgttttatgaggcccccagatctgtggattggagagagaaaggctacgtgactcctgtgaagaatcagggtcagtgtggttcttgttgggcttttagtgctactggtgctcttgaaggacagatgttccggaaaactgggaggcttatctcactgagtgagcagaatctggtagactgctctgggcctcaaggcaatgaaggctgcaatggtggcctaatggattatgctttccagtatgttcaggataatggaggcctggactctgaggaatcctatccatatgaggcaacagaagaatcctgtaagtacaatcccaagtattctgttgctaatgacaccggctttgtggacatccctaagcaggagaaggccctgatgaaggcagttgcaactgtggggcccatttctgttgctattgatgcaggtcatgagtccttcctgttctataaagaaggcatttattttgagccagactgtagcagtgaagacatggatcatggtgtgctggtggttggctacggatttgaaagcacagaatcagataacaataaatattggctggtgaagaacagctggggtgaagaatggggcatgggtggctacgtaaagatggccaaagaccggagaaaccattgtggaattgcctcagcagccagctaccccactgtgtga

SEQ ID NO: 23 - RNA, 648 nt, synthetic construct
  source 1..648: mol_type = other RNA
atgtatggcaagagctctactcgtgcggtgcttcttctccttggcatacagctcacagctctttggcctatagcagctgtggaaatttatacctcccgggtgctggaggctgttaatgggacagatgctcggttaaaatgcactttctccagctttgcccctgtgggtgatgctctaacagtgacctggaattttcgtcctctagacgggggacctgagcagtttgtattctactaccacatagatcccttccaacccatgagtgggcggtttaaggaccgggtgtcttgggatgggaatcctgagcggtacgatgcctccatccttctctggaaactgcagttcgacgacaatgggacatacacctgccaggtgaagaacccacctgatgttgatggggtgataggggagatccggctcagcgtcgtgcacactgtacgcttctctgagatccacttcctggctctggccattggctctgcctgtgcactgatgatcataatagtaattgtagtggtcctcttccagcattaccggaaaaagcgatgggccgaaagagctcataaagtggtggagataaaatcaaaagaagaggaaaggctcaaccaagagaaaaaggtctctgtttatttagaagacacagactaa

SEQ ID NO: 24 - RNA, 1020 nt, synthetic construct
  source 1..1020: mol_type = other RNA
atggcggaggcttcgagtgacccgggtgccgaggagcgggaagagttgctggggcccactgctcagtggagcgtggaggacgaggaggaggccgtccacgagcaatgccagcatgagagagacaggcagcttcaggcccaggacgaggagggaggcggccatgtccccgagcggccgaagcaggagatgctcctcagcctgaagccctcggaggcccctgaactggatgaggacgagggctttggcgactggtcccagaggccagagcagcggcagcagcacgagggggcgcagggcgccttggacagcggagagcccccccagtgcaggagtcctgagggggagcaagaggacaggcccggcctgcatgcctacgaaaaggaggacagtgatgaagtccacctggaggagttgagtctgagcaaggaggggccaggcccagaggacactgtccaggacaacctgggggccgcaggggctgaggaggaacaggaggagcaccagaaatgtcagcagcccaggacacccagccccttggtcttggaggggaccatcgaacagagctcgcctcccctgagccctaccaccaaactcatcgacaggaccgagtccctaaaccgctccatagagaagagtaacagtgtgaagaaatcccagccagacttgcccatctccaagattgatcagtggctggaacaatacacccaggccatcgagaccgctggccggacccccaagctagcccgccaggcctccatagagctgcccagcatggctgtggccagtaccaagagtcggtgggagacgggtgaggtacaggctcagtctgcggccaagactccgtcctgcaaggatattgtggctggagacatgagcaagaaaagcctctgggagcagaagggaggctccaagacctcatcaacaattaagagcaccccatctgggaagaggtataagtttgtggccaccgggcatgggaagtatgagaaggtgcttgtggaagggggcccggctccctag

SEQ ID NO: 25 - RNA, 498 nt, synthetic construct
  source 1..498: mol_type = other RNA
atgggtgccccgacgttgccccctgcctggcagccctttctcaaggaccaccgcatctctacattcaagaactggcccttcttggagggctgcgcctgcaccccggagcggatggccgaggctggcttcatccactgccccactgagaacgagccagacttggcccagtgtttcttctgcttcaaggagctggaaggctgggagccagatgacgaccccattgggccgggcacggtggcttacgcctgtaataccagcactttgggaggccgaggcgggcggatcacgagagaggaacataaaaagcattcgtccggttgcgctttcctttctgtcaagaagcagtttgaagaattaacccttggtgaatttttgaaactggacagagaaagagccaagaacaaaattgcaaaggaaaccaacaataagaagaaagaatttgaggaaactgcggagaaagtgcgccgtgccatcgagcagctggctgccatggattga

SEQ ID NO: 26 - RNA, 429 nt, synthetic construct
  source 1..429: mol_type = other RNA
atgatccgctttatcctcatccagaaccgggcaggcaagacgcgcctggccaagtggtacatgcagtttgatgatgatgagaaacagaagctgatcgaggaggtgcatgccgtggtcaccgtccgagacgccaaacacaccaactttgtggagttccggaactttaagatcatttaccgccgctatgctggcctctacttctgcatctgtgtggatgtcaatgacaacaacctggcttacctggaggccattcacaacttcgtggaggtcttaaacgaatatttccacaatgtctgtgaactggacctggtgttcaacttctacaaggtttacacggtcgtggacgagatgttcctggctggcgaaatccgagagaccagccagacgaaggtgctgaaacagctgctgatgctacagtccctggagtga

SEQ ID NO: 27 - RNA, 579 nt, synthetic construct
  source 1..579: mol_type = other RNA
atgcaggccatcaagtgcgtggtggtcggcgacggcgccgtggggaagacatgcttgctgatcagctacacgaccaacgccttccccggagagtacatccccaccgtttttgacaactactctgccaacgtgatggtggacgggaaaccagtcaacttggggctgtgggacacagcgggtcaggaggactacgatcggctgcggccactctcctacccccaaactgacgtctttctgatctgcttctctctggtgagcccggcctccttcgagaatgttcgtgccaagtggtacccggaggtgcggcaccactgcccccacacgcccatcctcctggtgggcaccaagctggacctccgcgacgacaaggacaccattgagcggctgcgggacaagaagctggcacccatcacctacccacagggcctggccatggcccgggagattggctctgtgaaatacctggagtgctcagccctgacccagcggggcctgaagacagtgtttgacgaggcgatccgcgcggtgctctgcccgcccccagtgaagaagccggggaagaagtgcaccgtcttctag

SEQ ID NO: 28 - RNA, 888 nt, synthetic construct
  source 1..888: mol_type = other RNA
atggggctgccagtgtcctgggcccctcctgccctctgggttctagggtgctgcgccctgctcctctcgctgtgggcgctgtgcacagcctgccgcaggcccgaggacgctgtagcccccaggaagagggcgcggaggcagcgggcgaggctgcagggcagtgcgacggcggcggaagcgtccctactgaggcggacccacctctgctccctcagcaagtcggacaccagactgcacgagctgcaccggggcccgcgcagcagcagggccctgcggcctgccagcatggatctcctgcgcccacactggctggaggtgtccagggacatcaccggaccgcaggcagccccctctgccttcccacaccaggagctgccccgggctctgccggcagctgcagccaccgcagggtgcgctggcctcgaggccacctattccaacgtggggctggcggcccttcccggggtcagcctggcggccagccctgtggtggccgagtatgcccgcgtccagaagcgcaaagggacccatcgcagtccccaagagccacagcaggggaagactgaggtgaccccggccgctcaggtggacgtcctgtactccagggtctgcaagcctaaaaggagggacccaggacccaccacagacccgctggaccccaagggccagggagcgattctggccctggcgggtgacctggcctaccagaccctcccgctcagggccctggatgtggacagcggccccctggaaaacgtgtatgagagcatccgggagctgggggaccctgctggcaggagcagcacgtgcggggctgggacgccccctgcttccagctgccccagcctagggaggggctggagacccctccctgcctccctgccctga

SEQ ID NO: 29 - DNA, 51 bp, synthetic construct
  source 1..51: mol_type = other DNA
agggaggcgaccgtgtgataaattaatggttttaaggagctggaaggctgg

SEQ ID NO: 30 - DNA, 50 bp, synthetic construct
  source 1..50: mol_type = other DNA
atcaccagagcgtcagactgtacgccaccattaaggagctggaaggctgg

SEQ ID NO: 31 - DNA, 50 bp, synthetic construct
  source 1..50: mol_type = other DNA
cttgagccttttcggtcatagcccgccaccttaaggagctggaaggctgg

SEQ ID NO: 32 - DNA, 48 bp, synthetic construct
  source 1..48: mol_type = other DNA
ttcattacatcttttcataaaccgcctcttaaggagctggaaggctgg

SEQ ID NO: 33 - DNA, 53 bp, synthetic construct
  source 1..53: mol_type = other DNA
tgaaatacgaaggtaaatattgacaaccgattgttaaggagctggaaggctgg

SEQ ID NO: 34 - DNA, 50 bp, synthetic construct
  source 1..50: mol_type = other DNA
aatttcatatgtgagtgaataaatcaagaattaaggagctggaaggctgg

SEQ ID NO: 35 - DNA, 48 bp, synthetic construct
  source 1..48: mol_type = other DNA
gcgagaatcgctattaattatacctgagttaaggagctggaaggctgg

SEQ ID NO: 36 - DNA, 50 bp, synthetic construct
  source 1..50: mol_type = other DNA
gctgatgctgaaaacatagcgaaaatcgcgttaaggagctggaaggctgg

SEQ ID NO: 37 - DNA, 51 bp, synthetic construct
  source 1..51: mol_type = other DNA
catcggcaatttgggaattagagttgtcacattaaggagctggaaggctgg

SEQ ID NO: 38 - DNA, 53 bp, synthetic construct
  source 1..53: mol_type = other DNA
gcgtttgcaaggtgaattatcacctaccagcgcttaaggagctggaaggctgg

SEQ ID NO: 39 - DNA, 50 bp, synthetic construct
  source 1..50: mol_type = other DNA
cggaaccttttttaatggaaacatttcattttaaggagctggaaggctgg

SEQ ID NO: 40 - DNA, 50 bp, synthetic construct; identical to SEQ ID NO: 39
  source 1..50: mol_type = other DNA

SEQ ID NO: 41 - DNA, 51 bp, synthetic construct
  source 1..51: mol_type = other DNA
atcaatatcttctgacctaaattaaggcgttttaaggagctggaaggctgg

SEQ ID NO: 42 - DNA, 53 bp, synthetic construct
  source 1..53: mol_type = other DNA
gtaaatcgaactttttcaaatataataattactttaaggagctggaaggctgg

SEQ ID NO: 43 - DNA, 53 bp, synthetic construct
  source 1..53: mol_type = other DNA
agaatcctaaatccaatcgcaagatatgcgttattaaggagctggaaggctgg

SEQ ID NO: 44 - DNA, 50 bp, synthetic construct
  source 1..50: mol_type = other DNA
gaaccacctggaaagcgcagtcgaaagtatttaaggagctggaaggctgg

SEQ ID NO: 45 - DNA, 50 bp, synthetic construct
  source 1..50: mol_type = other DNA
ctcagagcagtaagcgtcatacgcctatttttaaggagctggaaggctgg

SEQ ID NO: 46 - DNA, 48 bp, synthetic construct
  source 1..48: mol_type = other DNA
cctcagaggagtgtactggtacagtgccttaaggagctggaaggctgg

SEQ ID NO: 47 - DNA, 54 bp, synthetic construct
  source 1..54: mol_type = other DNA
tgaattaccagagccaccaccggatcaaaatcacttaaggagctggaaggctgg

SEQ ID NO: 48 - DNA, 50 bp, synthetic construct
  source 1..50: mol_type = other DNA
aacaaaatttatacttctgaatcaccagaattaaggagctggaaggctgg

SEQ ID NO: 49 - DNA, 50 bp, synthetic construct
  source 1..50: mol_type = other DNA
cagaggcggaaataaagaaattttgcccgattaaggagctggaaggctgg

SEQ ID NO: 50 - DNA, 52 bp, synthetic construct
  source 1..52: mol_type = other DNA
accgttcccaccaccctcagagcgcgcgttttttaaggagctggaaggctgg

SEQ ID NO: 51 - DNA, 54 bp, synthetic construct
  source 1..54: mol_type = other DNA
atgatacagccgccaccctcagaaccccttattattaaggagctggaaggctgg

SEQ ID NO: 52 - DNA, 50 bp, synthetic construct
  source 1..50: mol_type = other DNA
aacgggggcaattcatcaatatctgattatttaaggagctggaaggctgg

SEQ ID NO: 53 - DNA, 52 bp, synthetic construct
  source 1..52: mol_type = other DNA
tgtttggataattacatttaacaagtacataattaaggagctggaaggctgg

SEQ ID NO: 54 - DNA, 54 bp, synthetic construct
  source 1..54: mol_type = other DNA
ttagaaccagatgatgaaacaaacccttgcttctttaaggagctggaaggctgg

SEQ ID NO: 55 - DNA, 54 bp, synthetic construct
  source 1..54: mol_type = other DNA
gtaaaacaaattattcatttcaatattttcccttttaaggagctggaaggctgg

SEQ ID NO: 56 - DNA, 50 bp, synthetic construct
  source 1..50: mol_type = other DNA
taagaggcgaataggtgtatcagtagcattttaaggagctggaaggctgg

SEQ ID NO: 57 - DNA, 50 bp, synthetic construct
  source 1..50: mol_type = other DNA
cggaacctagtaccgccaccctagtttcgtttaaggagctggaaggctgg

SEQ ID NO: 58 - DNA, 48 bp, synthetic construct
  source 1..48: mol_type = other DNA
cgtataaaaccgccaccctcgcccaatattaaggagctggaaggctgg

SEQ ID NO: 59 - DNA, 54 bp, synthetic construct
  source 1..54: mol_type = other DNA
cagatgatgtcagtgccttgagtaaataagttttttaaggagctggaaggctgg

SEQ ID NO: 60 - DNA, 50 bp, synthetic construct
  source 1..50: mol_type = other DNA
ggagcggatcaaaccctcaatcaacaccgcttaaggagctggaaggctgg

SEQ ID NO: 61 - DNA, 48 bp, synthetic construct
  source 1..48: mol_type = other DNA
atcatttaaatcaacagttgaagataaattaaggagctggaaggctgg

SEQ ID NO: 62 - DNA, 50 bp, synthetic construct
  source 1..50: mol_type = other DNA
acgttatttatctaaaatatctgccattaattaaggagctggaaggctgg

SEQ ID NO: 63 - DNA, 52 bp, synthetic construct
  source 1..52: mol_type = other DNA
ggaggtttattattctgaaacattctgaatttttaaggagctggaaggctgg

SEQ ID NO: 64 - DNA, 54 bp, synthetic construct
  source 1..54: mol_type = other DNA
accctcagacagttaatgccccctatggcttttgttaaggagctggaaggctgg

SEQ ID NO: 65 - DNA, 50 bp, synthetic construct
  source 1..50: mol_type = other DNA
ccctcaaatctaaagcatcaccccagcagcttaaggagctggaaggctgg

SEQ ID NO: 66 - DNA, 52 bp, synthetic construct
  source 1..52: mol_type = other DNA
ctcaaataattatcatcatattcaatcctgatttaaggagctggaaggctgg

SEQ ID NO: 67 - DNA, 54 bp, synthetic construct
  source 1..54: mol_type = other DNA
cagttggctgcggaacaaagaaacaatggaagggttaaggagctggaaggctgg

SEQ ID NO: 68 - DNA, 54 bp, synthetic construct
  source 1..54: mol_type = other DNA
aggaaggtaattttaaaagtttgattatttgcacttaaggagctggaaggctgg

SEQ ID NO: 69 - DNA, 50 bp, synthetic construct
  source 1..50: mol_type = other DNA
ccacagacaacagtttcagcgggcgccgacttaaggagctggaaggctgg

SEQ ID NO: 70 - DNA, 50 bp, synthetic construct
  source 1..50: mol_type = other DNA
caccagtaacaactaaaggaatgaatttctttaaggagctggaaggctgg

SEQ ID NO: 71 - DNA, 48 bp, synthetic construct
  source 1..48: mol_type = other DNA
ggaaccccacgttgaaaatcttgtatcgttaaggagctggaaggctgg

SEQ ID NO: 72 - DNA, 54 bp, synthetic construct
  source 1..54: mol_type = other DNA
aaatgaaattttcagggatagcaaagagccaccattaaggagctggaaggctgg

SEQ ID NO: 73 - DNA, 50 bp, synthetic construct
  source 1..50: mol_type = other DNA
ctgcaacaaatcgtctgaaatgctggtaatttaaggagctggaaggctgg

SEQ ID NO: 74 - DNA, 48 bp, synthetic construct
  source 1..48: mol_type = other DNA
acagaggattcaccagtcacctgagtagttaaggagctggaaggctgg

SEQ ID NO: 75 - DNA, 50 bp, synthetic construct
  source 1..50: mol_type = other DNA
aaataccggacattctggccaaatacttctttaaggagctggaaggctgg

SEQ ID NO: 76 - DNA, 52 bp, synthetic construct
  source 1..52: mol_type = other DNA
agaaaggacaaactacaacgcctccgtactcattaaggagctggaaggctgg

SEQ ID NO: 77 - DNA, 54 bp, synthetic construct
  source 1..54: mol_type = other DNA
aattttttatgtaccgtaacactgcagaaccgccttaaggagctggaaggctgg

SEQ ID NO: 78 - DNA, 52 bp, synthetic construct
  source 1..52: mol_type = other DNA
tgacgctcgtgccacgctgagagttgctgaacttaaggagctggaaggctgg

SEQ ID NO: 79 - DNA, 54 bp, synthetic construct
  source 1..54: mol_type = other DNA
attggcagtgaggcggtcagtattaatatctggtttaaggagctggaaggctgg

SEQ ID NO: 80 - DNA, 54 bp, synthetic construct
  source 1..54: mol_type = other DNA
ataaaaggaacgaaccaccagcagaaaggaattgttaaggagctggaaggctgg

SEQ ID NO: 81 - DNA, 50 bp, synthetic construct
  source 1..50: mol_type = other DNA
aatgacaaagacagcatcggaagcgattatttaaggagctggaaggctgg

SEQ ID NO: 82 - DNA, 50 bp, synthetic construct
  source 1..50: mol_type = other DNA
taaacagcacagaggctttgagaatacactttaaggagctggaaggctgg

SEQ ID NO: 83 - DNA, 48 bp, synthetic construct
  source 1..48: mol_type = other DNA
gtttatcgaggaagtttccaaggcaccattaaggagctggaaggctgg

SEQ ID NO: 84 - DNA, 48 bp, synthetic construct; identical to SEQ ID NO: 83
  source 1..48: mol_type = other DNA

SEQ ID NO: 85 - DNA, 54 bp, synthetic construct
  source 1..54: mol_type = other DNA
acaggaaacaaaaggagcctttaatccaaaaaaattaaggagctggaaggctgg

SEQ ID NO: 86 - DNA, 50 bp, synthetic construct
  source 1..50: mol_type = other DNA
atccagaagttgctttgacgaggctggcaattaaggagctggaaggctgg

SEQ ID NO: 87 - DNA, 48 bp, synthetic construct
  source 1..48: mol_type = other DNA
aagaactctcgttagaatcaggaagaaattaaggagctggaaggctgg

SEQ ID NO: 88 - DNA, 50 bp, synthetic construct
  source 1..50: mol_type = other DNA
ttgattagaggccgattaaagggggaaagcttaaggagctggaaggctgg

SEQ ID NO: 89 - DNA, 52 bp, synthetic construct
  source 1..52: mol_type = other DNA
caacggctttgataccgatagttagtgagaatttaaggagctggaaggctgg

SEQ ID NO: 90 - DNA, 54 bp, synthetic construct
  source 1..54: mol_type = other DNA
tttttcatagcttgctttcgaggttgcgaataatttaaggagctggaaggctgg

SEQ ID NO: 91 - DNA, 50 bp, synthetic construct
  source 1..50: mol_type = other DNA
aaaatacgcttaatgcgccgctaccaccacttaaggagctggaaggctgg

SEQ ID NO: 92 - DNA, 52 bp, synthetic construct
  source 1..52: mol_type = other DNA
gtactatgcaatattaccgccagcctacatttttaaggagctggaaggctgg

SEQ ID NO: 93 - DNA, 54 bp, synthetic construct
  source 1..54: mol_type = other DNA
gtgctttccaaactatcggccttggattatttacttaaggagctggaaggctgg

SEQ ID NO: 94 - DNA, 54 bp, synthetic construct
  source 1..54: mol_type = other DNA
taaacaggtaataacatcacttgcacgaccagtattaaggagctggaaggctgg

SEQ ID NO: 95 - DNA, 50 bp, synthetic construct
  source 1..50: mol_type = other DNA
accaagcggacggtcaatcatattgccctgttaaggagctggaaggctgg

SEQ ID NO: 96 - DNA, 50 bp, synthetic construct
  source 1..50: mol_type = other DNA
aaaacactaactttgaaagagggtaacaaattaaggagctggaaggctgg

SEQ ID NO: 97 - DNA, 48 bp, synthetic construct
  source 1..48: mol_type = other DNA
acctaaagaccaggcgcatacaagaaccttaaggagctggaaggctgg

SEQ ID NO: 98 - DNA, 54 bp, synthetic construct
  source 1..54: mol_type = other DNA
acccgccgcgtaatgccactacgattaaacgggtttaaggagctggaaggctgg

SEQ ID NO: 99 - DNA, 50 bp, synthetic construct
  source 1..50: mol_type = other DNA
gtgtagcgtccagtttggaacaatcctgttttaaggagctggaaggctgg

SEQ ID NO: 100 - DNA, 48 bp, synthetic construct
  source 1..48: mol_type = other DNA
gcgaaagacgtggactccaaggtccacgttaaggagctggaaggctgg

SEQ ID NO: 101 - DNA, 50 bp, synthetic construct
  source 1..50: mol_type = other DNA
cggcgaaccgtctatcagggcgcaccgcctttaaggagctggaaggctgg

SEQ ID NO: 102 - DNA, 52 bp, synthetic construct
  source 1..52: mol_type = other DNA
aactgacccatctttgacccccacgagggtagttaaggagctggaaggctgg

SEQ ID NO: 103 - DNA, 54 bp, synthetic construct
  source 1..54: mol_type = other DNA
ggtgtacaacgaaagaggcaaaaggactaaagacttaaggagctggaaggctgg

SEQ ID NO: 104 - DNA, 50 bp, synthetic construct
  source 1..50: mol_type = other DNA
ccttcaaaaagaatagcccgagaaatccctttaaggagctggaaggctgg

SEQ ID NO: 105 - DNA, 52 bp, synthetic construct
  source 1..52: mol_type = other DNA
agtgttgtgtcacgctgcgcgtaacagggcgcttaaggagctggaaggctgg

SEQ ID NO: 106 - DNA, 54 bp, synthetic construct
  source 1..54: mol_type = other DNA
attaaagagagcgggcgctagggccacgtataacttaaggagctggaaggctgg

SEQ ID NO: 107 - DNA, 54 bp, synthetic construct
  source 1..54: mol_type = other DNA
cgaaaaacgtggcgagaaaggaaggagcgggagcttaaggagctggaaggctgg

SEQ ID NO: 108 - DNA, 50 bp, synthetic construct
  source 1..50: mol_type = other DNA
acgagaaataccagtcaggacgataaccctttaaggagctggaaggctgg

SEQ ID NO: 109 - DNA, 50 bp, synthetic construct
  source 1..50: mol_type = other DNA
gctgctcacgttaataaaacgaaattacgattaaggagctggaaggctgg

SEQ ID NO: 110 - DNA, 48 bp, synthetic construct
  source 1..48: mol_type = other DNA
ggatattttacaggtagaaatcaactaattaaggagctggaaggctgg

SEQ ID NO: 111 - DNA, 54 bp, synthetic construct
  source 1..54: mol_type = other DNA
tataaatctcaagagtaatcttgaggctggctgattaaggagctggaaggctgg

SEQ ID NO: 112 - DNA, 50 bp, synthetic construct
  source 1..50: mol_type = other DNA
tgatggtggcctaatgagtgagtgtttcctttaaggagctggaaggctgg

SEQ ID NO: 113 - DNA, 48 bp, synthetic construct
  source 1..48: mol_type = other DNA
ctggtttgttgcgctcactgccgagctcttaaggagctggaaggctgg

SEQ ID NO: 114 - DNA, 50 bp, synthetic construct
  source 1..50: mol_type = other DNA
ggccctgaaacctgtcgtgccacctgcaggttaaggagctggaaggctgg

SEQ ID NO: 115 - DNA, 52 bp, synthetic construct
  source 1..52: mol_type = other DNA
aaaatctattcagtgaataaggcagggaaccgttaaggagctggaaggctgg

SEQ ID NO: 116 - DNA, 54 bp, synthetic construct
  source 1..54: mol_type = other DNA
caacattacattacccaaatcaacacagatgaacttaaggagctggaaggctgg

SEQ ID NO: 117 - DNA, 50 bp, synthetic construct
  source 1..50: mol_type = other DNA
ttgagacgagccggaagcataaaattccacttaaggagctggaaggctgg

SEQ ID NO: 118 - DNA, 52 bp, synthetic construct
  source 1..52: mol_type = other DNA
cctggggtgttccgaaatcggcaatagggttgttaaggagctggaaggctgg

SEQ ID NO: 119 - DNA, 54 bp, synthetic construct
  source 1..54: mol_type = other DNA
ttaattgcgccccagcaggcgaaaagagtccactttaaggagctggaaggctgg

SEQ ID NO: 120 - DNA, 54 bp, synthetic construct
  source 1..54: mol_type = other DNA
agtcgggagagagttgcagcaagccgtcaaagggttaaggagctggaaggctgg

SEQ ID NO: 121 - DNA, 51 bp, synthetic construct
  source 1..51: mol_type = other DNA
cgtttaccatactgcggaatcgtatcgcgttttaaggagctggaaggctgg

SEQ ID NO: 122 - DNA, 51 bp, synthetic construct
  source 1..51: mol_type = other DNA
ggcatagtatccccctcaaatgcagattaagttaaggagctggaaggctgg

SEQ ID NO: 123 - DNA, 49 bp, synthetic construct
  source 1..49: mol_type = other DNA
tgcagatacgagaatgaccatatagtcagttaaggagctggaaggctgg

SEQ ID NO: 124 - DNA, 54 bp, synthetic construct
  source 1..54: mol_type = other DNA
acaacatatttaggaataccacatgattcatcagttaaggagctggaaggctgg

SEQ ID NO: 125 - DNA, 51 bp, synthetic construct
  source 1..51: mol_type = other DNA
gtgtgaaaccaggcaaagcgccattgaggggttaaggagctggaaggctgg

SEQ ID NO: 126 - DNA, 49 bp, synthetic construct
  source 1..49: mol_type = other DNA
gaattcggcaactgttgggaaatgggcgcttaaggagctggaaggctgg

SEQ ID NO: 127 - DNA, 51 bp, synthetic construct
  source 1..51: mol_type = other DNA
tcgactctctcttcgctattacgtgaccgtattaaggagctggaaggctgg

SEQ ID NO: 128 - DNA, 52 bp, synthetic construct
  source 1..52: mol_type = other DNA
ttcattgaaagagcaacactatcttgggaagattaaggagctggaaggctgg

SEQ ID NO: 129 - DNA, 54 bp, synthetic construct
  source 1..54: mol_type = other DNA
ttcagaaaacataacgccaaaaggactaacggaattaaggagctggaaggctgg

SEQ ID NO: 130 - DNA, 52 bp, synthetic construct
  source 1..52: mol_type = other DNA
gccggaaattgttatccgctcacagtgtaaagttaaggagctggaaggctgg

SEQ ID NO: 131 - DNA, 54 bp, synthetic construct
  source 1..54: mol_type = other DNA
caggctgctaatcatggtcatagcctaactcacattaaggagctggaaggctgg

SEQ ID NO: 132 - DNA, 54 bp, synthetic construct
  source 1..54: mol_type = other DNA
gtgcgggcagaggatccccgggtacccgctttccttaaggagctggaaggctgg

SEQ ID NO: 133 - DNA, 32 bp, synthetic construct
  source 1..32: mol_type = other DNA
agcgtctttccagagcctaatttgccagttac

SEQ ID NO: 134 - DNA, 32 bp, synthetic construct
  source 1..32: mol_type = other DNA
agggtaataatagcagcctttacagagagaat

SEQ ID NO: 135 - DNA, 31 bp, synthetic construct
  source 1..31: mol_type = other DNA
acccacaaaaacgattttttgtttaacgtca

SEQ ID NO: 136 - DNA, 32 bp, synthetic construct
  source 1..32: mol_type = other DNA
gagcaagaacagccatattatttatcccaatc

SEQ ID NO: 137 - DNA, 31 bp, synthetic construct
  source 1..31: mol_type = other DNA
catgtagacctgaatcttaccaacgctaacg

SEQ ID NO: 138 - DNA, 32 bp, synthetic construct
  source 1..32: mol_type = other DNA
tccttatcagttgctattttgcacccagctac

SEQ ID NO: 139 - DNA, 32 bp, synthetic construct
  source 1..32: mol_type = other DNA
aagtaccggcgggaggttttgaagccttaaat

SEQ ID NO: 140 - DNA, 31 bp, synthetic construct
  source 1..31: mol_type = other DNA
gtttttatacgcgaggcgttttagcgaacct

SEQ ID NO: 141 - DNA, 30 bp, synthetic construct
  source 1..30: mol_type = other DNA
tggcatcataaatcatacaggcaaggcaaa

SEQ ID NO: 142 - DNA, 31 bp, synthetic construct
  source 1..31: mol_type = other DNA
tatattttaaaattaagcaataaagcctcag

SEQ ID NO: 143 - DNA, 32 bp, synthetic construct
  source 1..32: mol_type = other DNA
catttcgcgctaaatcggttgtaccaaaaaca

SEQ ID NO: 144 - DNA, 30 bp, synthetic construct
  source 1..30: mol_type = other DNA
gaacgagctgtaatacttttgcgggagaag

SEQ ID NO: 145 - DNA, 32 bp, synthetic construct
  source 1..32: mol_type = other DNA
caatcatacatatattttaaatgcaatgcctg

SEQ ID NO: 146 - DNA, 30 bp, synthetic construct
  source 1..30: mol_type = other DNA
tcgatgagtaggtaaagattcaaaagggtg

SEQ ID NO: 147 - DNA, 31 bp, synthetic construct
  source 1..31: mol_type = other DNA
cattgcctcggagacagtcaaatcaccatca

SEQ ID NO: 148 - DNA, 31 bp, synthetic construct
  source 1..31: mol_type = other DNA
cctttatttcaacgcaaggataaaaattttt

SEQ ID NO: 149 - DNA, 32 bp, synthetic construct
  source 1..32: mol_type = other DNA
agcgtctttccagagcctaatttggggagaag

SEQ ID NO: 150 - DNA, 32 bp, synthetic construct
  source 1..32: mol_type = other DNA
agggtaataatagcagcctttacaaaggcaaa

SEQ ID NO: 151 - DNA, 30 bp, synthetic construct
  source 1..30: mol_type = other DNA
acccacaaaaacgattttttgttgcctcag

SEQ ID NO: 152 - DNA, 32 bp, synthetic construct
  source 1..32: mol_type = other DNA
gagcaagaacagccatattatttacaaaaaca

SEQ ID NO: 153 - DNA, 30 bp, synthetic construct
  source 1..30: mol_type = other DNA
catgtagacctgaatcttaccaaaattttt

SEQ ID NO: 154 - DNA, 32 bp, synthetic construct
  source 1..32: mol_type = other DNA
tccttatcagttgctattttgcacaatgcctg

SEQ ID NO: 155 - DNA, 32 bp, synthetic construct
  source 1..32: mol_type = other DNA
aagtaccggcgggaggttttgaagaaagggtg

SEQ ID NO: 156 - DNA, 30 bp, synthetic construct
  source 1..30: mol_type = other DNA
gtttttatacgcgaggcgttttaaccatca

SEQ ID NO: 157 - DNA, 30 bp, synthetic construct
  source 1..30: mol_type = other DNA
tggcatcataaatcatacaggcgagagaat

SEQ ID NO: 158 - DNA, 32 bp, synthetic construct
  source 1..32: mol_type = other DNA
tatattttaaaattaagcaataaataacgtca

SEQ ID NO: 159 - DNA, 32 bp, synthetic construct
  source 1..32: mol_type = other DNA
catttcgcgctaaatcggttgtactcccaatc

SEQ ID NO: 160 - DNA, 30 bp, synthetic construct
  source 1..30: mol_type = other DNA
gaacgagctgtaatacttttgcccagttac

SEQ ID NO: 161 - DNA, 32 bp, synthetic construct
  source 1..32: mol_type = other DNA
caatcatacatatattttaaatgcccagctac

SEQ ID NO: 162 - DNA, 30 bp, synthetic construct
  source 1..30: mol_type = other DNA
tcgatgagtaggtaaagattcaccttaaat

SEQ ID NO: 163 - DNA, 32 bp, synthetic construct
  source 1..32: mol_type = other DNA
cattgcctcggagacagtcaaatcgcgaacct

SEQ ID NO: 164 - DNA, 32 bp, synthetic construct
  source 1..32: mol_type = other DNA
cctttatttcaacgcaaggataaacgctaacg

SEQ ID NO: 165 - DNA, 60 bp, synthetic construct
  source 1..60: mol_type = other DNA
gtgtcgtagacaccatgtaatttaggcagaggcacattaccgcgcccaatagcaagtttt

SEQ ID NO: 166 - DNA, 60 bp, synthetic construct
  source 1..60: mol_type = other DNA
gtgtcgtagacacgtctgagagactacctttttatcgccatatttaacaacgccaatttt

SEQ ID NO: 167 - DNA, 61 bp, synthetic construct
  source 1..61: mol_type = other DNA
gtgtcgtagacacatcgggagaaacaataacggatagtgaatttatcaaaatcatagtttt

SEQ ID NO: 168 - DNA, 61 bp, synthetic construct
  source 1..61: mol_type = other DNA
gtgtcgtagacacgatttagaagtattagacttttatacagtaacagtaccttttactttt

SEQ ID NO: 169 - DNA, 61 bp, synthetic construct
  source 1..61: mol_type = other DNA
gtgtcgtagacactttttgaatggctattagtctcgtcaatagataatacatttgagtttt

SEQ ID NO: 170 - DNA, 61 bp, synthetic construct
  source 1..61: mol_type = other DNA
gtgtcgtagacacgaggccaccgagtaaaagagtaagaatacgtggcacagacaatatttt

SEQ ID NO: 171 - DNA, 61 bp, synthetic construct
  source 1..61: mol_type = other DNA
gtgtcgtagacacgtaaagcactaaatcggaacctgagaagtgtttttataatcagttttt

SEQ ID NO: 172 - DNA, 61 bp, synthetic construct
  source 1..61: mol_type = other DNA
gtgtcgtagacacccagggtggtttttcttttcaaagttttttggggtcgaggtgcctttt

SEQ ID NO: 173 - DNA, 61 bp, synthetic construct
  source 1..61: mol_type = other DNA
gtgtcgtagacacggttttcccagtcacgacgttagaggcggtttgcgtattgggcgtttt

SEQ ID NO: 174 - DNA, 60 bp, synthetic construct
  source 1..60: mol_type = other DNA
gtgtcgtagacacaatgtgagcgagtaacaaccccgattaagttgggtaacgccagtttt

SEQ ID NO: 175 - DNA, 44 bp, synthetic construct
  source 1..44: mol_type = other DNA
gtgtcgtagacacggagatagccagctttcatcaacattatttt

SEQ ID NO: 176 - DNA, 58 bp, synthetic construct
  source 1..58: mol_type = other DNA
gtgtcgtagacactagacgggagaattaaaaacagggaagcgcatgtgtcgtagacac

SEQ ID NO: 177 - DNA, 58 bp, synthetic construct
  source 1..58: mol_type = other DNA
gtgtcgtagacacatacatacataaaggtttagcaaacgtagaaagtgtcgtagacac

SEQ ID NO: 178 - DNA, 58 bp, synthetic construct
  source 1..58: mol_type = other DNA
gtgtcgtagacactcgatagcagcaccgtgtcaccaatgaaaccagtgtcgtagacac

SEQ ID NO: 179 - DNA, 58 bp, synthetic construct
  source 1..58: mol_type = other DNA
gtgtcgtagacacattggccttgatattctgaggcaggtcagacggtgtcgtagacac

SEQ ID NO: 180 - DNA, 58 bp, synthetic construct
  source 1..58: mol_type = other DNA
gtgtcgtagacacaccaggcggataagtgcggggttttgctcagtgtgtcgtagacac

SEQ ID NO: 181 - DNA, 58 bp, synthetic construct
  source 1..58: mol_type = other DNA
gtgtcgtagacacacgttagtaaatgaattttgtcgtctttccaggtgtcgtagacac

SEQ ID NO: 182 - DNA, 58 bp, synthetic construct
  source 1..58: mol_type = other DNA
gtgtcgtagacacagggagttaaaggccgggtcgctgaggcttgcgtgtcgtagacac

SEQ ID NO: 183 - DNA, 58 bp, synthetic construct
  source 1..58: mol_type = other DNA
gtgtcgtagacactcgaaatccgcgacctcgcctgataaattgtggtgtcgtagacac

SEQ ID NO: 184 - DNA, 58 bp, synthetic construct
  source 1..58: mol_type = other DNA
gtgtcgtagacacttaatcattgtgaatttggtttaatttcaactgtgtcgtagacac

SEQ ID NO: 185 - DNA, 58 bp, synthetic construct
  source 1..58: mol_type = other DNA
gtgtcgtagacactttgccagagggggtacttttgcaaaagaagtgtgtcgtagacac

SEQ ID NO: 186 - DNA, 58 bp, synthetic construct
  source 1..58: mol_type = other DNA
gtgtcgtagacactagagagtacctttaatccaacaggtcaggatgtgtcgtagacac

SEQ ID NO: 187 - DNA, 58 bp, synthetic construct
  source 1..58: mol_type = other DNA
gtgtcgtagacacgtagcattaacatccaaattctactaatagtagtgtcgtagacac

SEQ ID NO: 188 - DNA, 18 bp, synthetic construct
  source 1..18: mol_type = other DNA
taatacgactcactatag

SEQ ID NO: 189 - DNA, 46 bp, synthetic construct
  source 1..46: mol_type = other DNA
aacataactgaacaccctgaattattacgttgaactggagtagcac

SEQ ID NO: 190 - DNA, 48 bp, synthetic construct
  source 1..48: mol_type = other DNA
aaaatgaatgagcgctaatatcaatacccaattgaactggagtagcac

SEQ ID NO: 191 - DNA, 48 bp, synthetic construct
  source 1..48: mol_type = other DNA
caaataaggaattgagttaagccaaggaaacttgaactggagtagcac

SEQ ID NO: 192 - DNA, 46 bp, synthetic construct
  source 1..46: mol_type = other DNA
aaaataaaacaatgaaatagcaagtaagcttgaactggagtagcac

SEQ ID NO: 193 - DNA, 48 bp, synthetic construct
  source 1..48: mol_type = other DNA
aattttataaccaatcaataatcagaacgcgttgaactggagtagcac

SEQ ID NO: 194 - DNA, 46 bp, synthetic construct
  source 1..46: mol_type = other DNA
caagattattccaagaacggggacgacaattgaactggagtagcac

SEQ ID NO: 195 - DNA, 48 bp, synthetic construct
  source 1..48: mol_type = other DNA
cccgacttcactcatcgagaacaaccgacaattgaactggagtagcac

SEQ ID NO: 196 - DNA, 48 bp, synthetic construct
  source 1..48: mol_type = other DNA
ttctaagatttcatcgtaggaatttttcgagttgaactggagtagcac

SEQ ID NO: 197 - DNA, 46 bp, synthetic construct
  source 1..46: mol_type = other DNA
caaatcagatatagaaggcttatccggtattgaactggagtagcac

SEQ ID NO: 198 - DNA, 48 bp, synthetic construct
  source 1..48: mol_type = other DNA
cttaccgtaatatcccatcctaatcctgaacttgaactggagtagcac

SEQ ID NO: 199 - DNA, 46 bp, synthetic construct
  source 1..46: mol_type = other DNA
cagtatgggcaacatataaaaagcaaggcttgaactggagtagcac

SEQ ID NO: 200 - DNA, 48 bp, synthetic construct
  source 1..48: mol_type = other DNA
aagaactgcggaataagtttattccagcaaattgaactggagtagcac

SEQ ID NO: 201 - DNA, 48 bp, synthetic construct
  source 1..48: mol_type = other DNA
cgaggaaaaaaattcatatggttgtcaccgattgaactggagtagcac

SEQ ID NO: 202 - DNA, 46 bp, synthetic construct
  source 1..46: mol_type = other DNA
agatagcaaagggcgacattcggaaattattgaactggagtagcac

SEQ ID NO: 203 - DNA, 50 bp, synthetic construct
  source 1..50: mol_type = other DNA
aagaaaaaaagccctttttaagaaaatagctatttgaactggagtagcac

SEQ ID NO: 204 - DNA, 48 bp, synthetic construct
  source 1..48: mol_type = other DNA
cctgtttaataaacaccggaatcttttagttttgaactggagtagcac

SEQ ID NO: 205 - DNA, 46 bp, synthetic construct
  source 1..46: mol_type = other DNA
taaacaacctgtttagtatcacaaagaacttgaactggagtagcac

SEQ ID NO: 206 - DNA, 48 bp, synthetic construct
  source 1..48: mol_type = other DNA
aaggtaaacttaccagtataaagatgtaaatttgaactggagtagcac

SEQ ID NO: 207 - DNA, 48 bp, synthetic construct
  source 1..48: mol_type = other DNA
ccagtaatgggcttaattgagaaacctccggttgaactggagtagcac

SEQ ID NO: 208 - DNA, 50 bp, synthetic construct
  source 1..50: mol_type = other DNA
agacaccagcatgattaagactcccaaagtcagttgaactggagtagcac

SEQ ID NO: 209 - DNA, 48 bp, synthetic construct
  source 1..48: mol_type = other DNA
atcaatagcgcaataataacggagagagatattgaactggagtagcac

SEQ ID NO: 210 - DNA, 50 bp, synthetic construct
  source 1..50: mol_type = other DNA
caaagacacgaacaaagttaccagcaataataattgaactggagtagcac

SEQ ID NO: 211 - DNA, 48 bp, synthetic construct
  source 1..48: mol_type = other DNA
aaataagatcaacaatagataagtttacgagttgaactggagtagcac

SEQ ID NO: 212 - DNA, 50 bp, synthetic construct
  source 1..50: mol_type = other DNA
agaaaaagcatgttcagctaatgcggctgtcttttgaactggagtagcac

SEQ ID NO: 213 - DNA, 50 bp, synthetic construct
  source 1..50: mol_type = other DNA
tacaaattgtaattctgtccagactattaaaccttgaactggagtagcac

SEQ ID NO: 214 - DNA, 48 bp, synthetic construct
  source 1..48: mol_type = other DNA
caacagtaaagagaatataaagtagcaagccttgaactggagtagcac

SEQ ID NO: 215 - DNA, 45 bp, synthetic construct
  source 1..45: mol_type = other DNA
cggaaacaatcagtagcgacgcattgacttgaactggagtagcac

SEQ ID NO: 216 - DNA, 47 bp, synthetic construct
  source 1..47: mol_type = other DNA
cttaggttctgagaagagtcaattcgcctgttgaactggagtagcac

SEQ ID NO: 217 - DNA, 50 bp, synthetic construct
  source 1..50: mol_type = other DNA
ttgccttttagcaccattaccattgaaacgcaattgaactggagtagcac

SEQ ID NO: 218 - DNA, 48 bp, synthetic construct
  source 1..48: mol_type = other DNA
ttaagacggggttatataactatccaacgctttgaactggagtagcac

SEQ ID NO: 219 - DNA, 45 bp, synthetic construct
  source 1..45: mol_type = other DNA
aggaggtacaaacaaataaaaaggattattgaactggagtagcac

SEQ ID NO: 220 - DNA, 47 bp, synthetic construct
  source 1..47: mol_type = other DNA
attgcttttaacgtcagatgaaacaaacaattgaactggagtagcac

SEQ ID NO: 221 - DNA, 51 bp, synthetic construct
  source 1..51: mol_type = other DNA
agccagaaaccagagccgccgccaagaatcaagtttgaactggagtagcac

SEQ ID NO: 222 - DNA, 49 bp, synthetic construct
  source 1..49: mol_type = other DNA
ttcaggttgaataccaagttacatagcttagattgaactggagtagcac

SEQ ID NO: 223 - DNA, 45 bp, synthetic construct
  source 1..45: mol_type = other DNA
ggattagccgtcgagagggtgtaacgatttgaactggagtagcac

SEQ ID NO: 224 - DNA, 47 bp, synthetic construct
  source 1..47: mol_type = other DNA
ttcgacaataatagattagagcttaatgcgttgaactggagtagcac

SEQ ID NO: 225 - DNA, 51 bp, synthetic construct
  source 1..51: mol_type = other DNA
atagcccgtgagactcctcaagagtcctcattaattgaactggagtagcac

SEQ ID NO: 226 - DNA, 49 bp, synthetic construct
  source 1..49: mol_type = other DNA
ctaacaacctcgtattaaatcctgcgtagattttgaactggagtagcac

SEQ ID NO: 227 - DNA, 45 bp, synthetic construct
  source 1..45: mol_type = other DNA
ctaaagttttctgtatgggaataaccgattgaactggagtagcac

SEQ ID NO: 228 - DNA, 47 bp, synthetic construct
  source 1..47: mol_type = other DNA
cgaactgatgacctgaaagcgtctgtccatttgaactggagtagcac

SEQ ID NO: 229 - DNA, 51 bp, synthetic construct
  source 1..51: mol_type = other DNA
caactttcagccctcatagttagctgatataagtttgaactggagtagcac

SEQ ID NO: 230 - DNA, 49 bp, synthetic construct
  source 1..49: mol_type = other DNA
aacccttctagccctaaaacatcttaggagcattgaactggagtagcac

SEQ ID NO: 231 - DNA, 45 bp, synthetic construct
  source 1..45: mol_type = other DNA
tatattccttttgcgggatcggagatttttgaactggagtagcac

SEQ ID NO: 232 - DNA, 47 bp, synthetic construct
  source 1..47: mol_type = other DNA
cacgcaaagtacgccagaatccctaaagggttgaactggagtagcac

SEQ ID NO: 233 - DNA, 51 bp, synthetic construct
  source 1..51: mol_type = other DNA
gcagcgaacaaccatcgcccacgcttttgctaaattgaactggagtagcac

SEQ ID NO: 234 - DNA, 49 bp, synthetic construct
  source 1..49: mol_type = other DNA
caggaacgttaaccgttgtagcacagagatagttgaactggagtagcac

SEQ ID NO: 235 - DNA, 45 bp, synthetic construct
  source 1..45: mol_type = other DNA
gtatcatgctccatgttactaaattgggttgaactggagtagcac

SEQ ID NO: 236 - DNA, 47 bp, synthetic construct
  source 1..47: mol_type = other DNA
agcccccgccatcacccaaatcccagtgagttgaactggagtagcac

SEQ ID NO: 237 - DNA, 51 bp, synthetic construct
  source 1..51: mol_type = other DNA
gaggcgcacgaaacaaagtacaacgtcaccctcattgaactggagtagcac

SEQ ID NO: 238 - DNA, 49 bp, synthetic construct
  source 1..49: mol_type = other DNA
tacgtgaaatttagagcttgacggattttagattgaactggagtagcac

SEQ ID NO: 239 - DNA, 45 bp, synthetic construct
  source 1..45: mol_type = other DNA
cttgagaaccttatgcgattcaaaatagttgaactggagtagcac

SEQ ID NO: 240 - DNA, 47 bp, synthetic construct
  source 1..47: mol_type = other DNA
acgggcaagccaacgcgcgggggtaaaacgttgaactggagtagcac

SEQ ID NO: 241 - DNA, 51 bp, synthetic construct
  source 1..51: mol_type = other DNA
gctcattacaccagaacgagtagttagccggaacttgaactggagtagcac

SEQ ID NO: 242 - DNA, 49 bp, synthetic construct
  source 1..49: mol_type = other DNA
atgaatcgcagctgattgcccttatggcccacttgaactggagtagcac

SEQ ID NO: 243 - DNA, 46 bp, synthetic construct
  source 1..46: mol_type = other DNA
cgagaggatagtaaaatgtttagaccggattgaactggagtagcac

SEQ ID NO: 244 - DNA, 48 bp, synthetic construct
  source 1..48: mol_type = other DNA
acggccagggatgtgctgcaagggtcggattttgaactggagtagcac

SEQ ID NO: 245 - DNA, 51 bp, synthetic construct
  source 1..51: mol_type = other DNA
agcgtccaagacgacgataaaaacttaagaactgttgaactggagtagcac

SEQ ID NO: 246 - DNA, 48 bp, synthetic construct
  source 1..48: mol_type = other DNA
atcaggtcagctttccggcaccgaagatcgcttgaactggagtagcac

SEQ ID NO: 247 - DNA, 49 bp, synthetic construct
  source 1..49: mol_type = other DNA
cgaaagggtgccaagcttgcatggctgcattattgaactggagtagcac

SEQ ID NO: 248 - DNA, 46 bp, synthetic construct
  source 1..46: mol_type = other DNA
agcaaacttgctccttttgattgaaaaggttgaactggagtagcac

SEQ ID NO: 249 - DNA, 48 bp, synthetic construct
  source 1..48: mol_type = other DNA
ttaattcggatggcttagagctttgtttagcttgaactggagtagcac

SEQ ID NO: 250 - DNA, 48 bp, synthetic construct
  source 1..48: mol_type = other DNA
aggaagccgctgtagctcaacatattagatattgaactggagtagcac

SEQ ID NO: 251 - DNA, 46 bp, synthetic construct
  source 1..46: mol_type = other DNA
aagcaaaaaagtacggtgtctaattctgcttgaactggagtagcac

SEQ ID NO: 252 - DNA, 50 bp, synthetic construct
  source 1..50: mol_type = other DNA
actccagcctttaccctgactattaaatcaaaattgaactggagtagcac

SEQ ID NO: 253 - DNA, 48 bp, synthetic construct
  source 1..48: mol_type = other DNA
acgacgacattgtaaacgttaattagcatgtttgaactggagtagcac

SEQ ID NO: 254 - DNA, 46 bp, synthetic construct
  source 1..46: mol_type = other DNA
atcgtaaattaaatttttgttcaagagaattgaactggagtagcac

SEQ ID NO: 255 - DNA, 48 bp, synthetic construct
  source 1..48: mol_type = other DNA
atgggataaaccaataggaacgctatcaggtttgaactggagtagcac

SEQ ID NO: 256 - DNA, 48 bp, synthetic construct
  source 1..48: mol_type = other DNA
ctccgtggcgtctggccttcctggggtagctttgaactggagtagcac

SEQ ID NO: 257 - DNA, 50 bp, synthetic construct
  source 1..50: mol_type = other DNA
tttttgcgagcttcaaagcgaaccagactggatttgaactggagtagcac

SEQ ID NO: 258 - DNA, 48 bp, synthetic construct
  source 1..48: mol_type = other DNA
aatataatcgaaagacttcaaatcataaatattgaactggagtagcac

SEQ ID NO: 259 - DNA, 50 bp, synthetic construct
  source 1..50: mol_type = other DNA
atgcaactgcggattgcatcaaaatttaaacagttgaactggagtagcac

SEQ ID NO: 260 - DNA, 48 bp, synthetic construct
  source 1..48: mol_type = other DNA
attccataaaacaggaagattgtaatcagaattgaactggagtagcac

SEQ ID NO: 261 - DNA, 48 bp, synthetic construct
  source 1..48: mol_type = other DNA
atatttaaagtatcggcctcaggcttctggtttgaactggagtagcac

SEQ ID NO: 262 - DNA, 50 bp, synthetic construct
  source 1..50: mol_type = other DNA
aaattcgcccgtgcatctgccagtttcgccattttgaactggagtagcac

SEQ ID NO: 263 - DNA, 50 bp, synthetic construct
  source 1..50: mol_type = other DNA
cattttttggtcacgttggtgtaggggcgatcgttgaactggagtagcac

SEQ ID NO: 264 - DNA, 48 bp, synthetic construct
  source 1..48: mol_type = other DNA
ataattcggaacaaacggcggatccagctggttgaactggagtagcac

SEQ ID NO: 265 - DNA, 50 bp, synthetic construct
  source 1..50: mol_type = other DNA
aagccccaataacagttgattcccggaagtttcttgaactggagtagcac

SEQ ID NO: 266 - DNA, 46 bp, synthetic construct
  source 1..46: mol_type = other DNA
atttttgattcaaccgttctagctgataattgaactggagtagcac

SEQ ID NO: 267 - DNA, 50 bp, synthetic construct
  source 1..50: mol_type = other DNA
gaattagccatttggggcgcgagcaagaggtcattgaactggagtagcac

SEQ ID NO: 268 - DNA, 48 bp, synthetic construct
  source 1..48: mol_type = other DNA
agcataaaaaatggtcaataaccaattgctgttgaactggagtagcac

SEQ ID NO: 269 - DNA, 50 bp, synthetic construct
  source 1..50: mol_type = other DNA
ttatgacctagatttagtttgaccgttttaaatttgaactggagtagcac

SEQ ID NO: 270 - DNA, 48 bp, synthetic construct
  source 1..48: mol_type = other DNA
agaacccttgtaccccggttgatataagcaattgaactggagtagcac

SEQ ID NO: 271 - DNA, 50 bp, synthetic construct
  source 1..50: mol_type = other DNA
agtaatgtacggtaatcgtaaaacattttgttattgaactggagtagcac

SEQ ID NO: 272 - DNA, 50 bp, synthetic construct
  source 1..50: mol_type = other DNA
agaaaggcgagagtctggagcaaaaaatcagctttgaactggagtagcac

SEQ ID NO: 273 - DNA, 48 bp, synthetic construct
  source 1..48: mol_type = other DNA
atatgatagagatctacaaaggccatcaaaattgaactggagtagcac

SEQ ID NO: 274 - RNA, 726 nt, synthetic construct
  source 1..726: mol_type = other RNA
acaaaaaagctgatgagcaagggcgaggagctgttcaccggggtggtgcccatcctggtcgagctggacggcgacgtaaacggccacaagttcagcgtgtccggcgagggcgagggcgatgccacctacggcaagctgaccctgaagttcatctgcaccaccggcaagctgcccgtgccctggcccaccctcgtgaccaccctgacctacggcgtgcagtgcttcagccgctaccccgaccacatgaagcagcacgacttcttcaagtccgccatgcccgaaggctacgtccaggagcgcaccatcttcttcaaggacgacggcaactacaagacccgcgccgaggtgaagttcgagggcgacaccctggtgaaccgcatcgagctgaagggcatcgacttcaaggaggacggcaacatcctggggcacaagctggagtacaactacaacagccacaacgtctatatcatggccgacaagcagaagaacggcatcaaggtgaacttcaagatccgccacaacatcgaggacggcagcgtgcagctcgccgaccactaccagcagaacacccccatcggcgacggccccgtgctgctgcccgacaaccactacctgagcacccagtccgccctgagcaaagaccccaacgagaagcgcgatcacatggtcctgctggagttcgtgaccgccgccgggatcactctcggcatggacgagctgtacaag

SEQ ID NO: 275 - RNA, 56 nt, synthetic construct
  source 1..56: mol_type = other RNA
tccagcaggaccatgtgccctcgccgccgagagtgatcccggcggcggtcacgaac

SEQ ID NO: 276 - RNA, 134 nt, synthetic construct
  source 1..134: mol_type = other RNA
acttcagggccgtttacgtcgccgatcagcttttttgtcttgtacagctcgtccatggacacgctgaacttgtggtcagcttgccgtaggtctcaggtagtggttgtcgagctgcacgctgccgtatggcggac

SEQ ID NO: 277 - RNA, 86 nt, synthetic construct
  source 1..86: mol_type = other RNA
ggtgaacagctcctcgcccttgctctccagctcgaccaggagcagcttgccggtggtccgtcgccgatgggtcacgagggtgggcc

SEQ ID NO: 278 - RNA, 22 nt, synthetic construct
  source 1..22: mol_type = other RNA
agggcacggtgggcaccacccc

SEQ ID NO: 279 - RNA, 56 nt, synthetic construct
  source 1..56: mol_type = other RNA
ggtctttgctcagggcggactgggtgggcatcgccctcgatcgcgcttctcgttgg

SEQ ID NO: 280 - RNA, 130 nt, synthetic construct
  source 1..130: mol_type = other RNA
ttgaagaattgaagaagatggtgcgactccagcttgtgccccaggatgttgccgtcctgtagttgccgtcgtccgtcgtgctgcttcatggctggtagtggtcggcgggcagcagcacgggggcagatga

SEQ ID NO: 281 - RNA, 56 nt, synthetic construct
  source 1..56: mol_type = other RNA
ccttgatgccgttcttcccttcgggccctcgatgttgtggcggatcttgaagttca

SEQ ID NO: 282 - RNA, 97 nt, synthetic construct
  source 1..97: mol_type = other RNA
gccgtaggtcagggtggggtgttcttggtcggggtagcggccctcggcgcgggtcttccttgaagtcgatgcccttcagctcgatgcggttcaccag

SEQ ID NO: 283 - RNA, 33 nt, synthetic construct
  source 1..33: mol_type = other RNA
ggtgtcgccctcgaacttcatgaagcactgcac

SEQ ID NO: 284 - RNA, 56 nt, synthetic construct
  source 1..56: mol_type = other RNA
atagacgttgtggctgttgtagttgtctcctggacgtagtgcttgtcggccatgat

SEQ ID NO: 285 - RNA, 704 nt, synthetic construct
  source 1..704: mol_type = other RNA
gtgagcaagggcgaggaggacaacatggccatcatcaaggagttcatgcgcttcaaggtgcacatggagggctccgtgaacggccacgagttcgagatcgagggcgagggcgagggccgcccctacgagggcacccagaccgccaagctgaaggtgaccaagggcggccccctgcccttcgcctgggacatcctgtcccctcagttcatgtacggctccaaggcctacgtgaagcaccccgccgacatccccgactacttgaagctgtccttccccgagggcttcaagtgggagcgcgtgatgaacttcgaggacggcggcgtggtgaccgtgacccaggactcctccctgcaggacggcgagttcatctacaaggtgaagctgcgcggcaccaacttcccctccgacggccccgtaatgcagaagaagaccatgggctgggaggcctcctccgagcggatgtaccccgaggacggcgccctgaagggcgagatcaagcagaggctgaagctgaaggacggcggccactacgacgccgaggtcaagaccacctacaaggccaagaagcccgtgcagctgcccggcgcctacaacgtcaacatcaagctggacatcacctcccacaacgaggactacaccatcgtggaacagtacgagcgcgccgagggccgccactccaccggcggcatggacgagctgtacaa

SEQ ID NO: 286 - RNA, 56 nt, synthetic construct
  source 1..56: mol_type = other RNA
cgtactgttccacgatgccctcgccccgccggtggagtggcggccctcggcgcgct

SEQ ID NO: 287 - RNA, 50 nt, synthetic construct
  source 1..50: mol_type = other RNA
gtccatgctcgatctcgaactcgtggtctgggtgccctcgtacgttgtag

SEQ ID NO: 288 - RNA, 49 nt, synthetic construct
  source 1..49: mol_type = other RNA
gcttggcggccgttcacggagccctcgcccttgctcacttgtacagctc

SEQ ID NO: 289 - RNA, 49 nt, synthetic construct
  source 1..49: mol_type = other RNA
cttgatgatggccatgttgtcctcctccatgtgcaccttgagggggccg

SEQ ID NO: 290 - RNA, 22 nt, synthetic construct
  source 1..22: mol_type = other RNA
cgaagggcaagcgcatgaactc

SEQ ID NO: 291 - RNA, 53 nt, synthetic construct
  source 1..53: mol_type = other RNA
gcttgatctccagcttgatgttgaggggcggccctcggtgtagtcctcgttgt

SEQ ID NO: 292 - RNA, 32 nt, synthetic construct
  source 1..32: mol_type = other RNA
cgtagtggagctgcacgggcttctcaccttca

SEQ ID NO: 293 - RNA, 37 nt, synthetic construct
  source 1..37: mol_type = other RNA
cccttggttggccttgtaggtgacaggatgtcccagg

SEQ ID NO: 294 - RNA, 24 nt, synthetic construct
  source 1..24: mol_type = other RNA
ggaggtgatgtcgcccttcagggc

SEQ ID NO: 295 - RNA, 35 nt, synthetic construct
  source 1..35: mol_type = other RNA
gcgccgggcccgccgtccttcagcttgggaaggac

SEQ ID NO: 296 - RNA, 34 nt, synthetic construct
  source 1..34: mol_type = other RNA
gccgtcctcggggtacaaagccctcgcagcctct

SEQ ID NO: 297 - RNA, 32 nt, synthetic construct
  source 1..32: mol_type = other RNA
cgccgccggtagtcggggatgtcgctcggcgt

SEQ ID NO: 298 - RNA, 49 nt, synthetic construct
  source 1..49: mol_type = other RNA
gtacatgaactgagggggtcttgacgcggggtgcttcacgtaggagtcc

SEQ ID NO: 299 - RNA, 17 nt, synthetic construct
  source 1..17: mol_type = other RNA
agcttcaatcctcgaag

SEQ ID NO: 300 - RNA, 22 nt, synthetic construct
  source 1..22: mol_type = other RNA
cctgcagggaggccttggagcc

SEQ ID NO: 301 - RNA, 56 nt, synthetic construct
  source 1..56: mol_type = other RNA
tcccagcccatggtcttcttctgcatgcgctcccacttgtccgctcggaggaggcc

SEQ ID NO: 302 - RNA, 49 nt, synthetic construct
  source 1..49: mol_type = other RNA
ttcatcactacggggccgtcggaggggaagttggtgccgcgggtcacca

SEQ ID NO: 303 - RNA, 37 nt, synthetic construct
  source 1..37: mol_type = other RNA
tgggtcaccagcttcaccttgtagatgaactcgccgt

SEQ ID NO: 304 - DNA, 27 bp, synthetic construct
  source 1..27: mol_type = other DNA
  misc_binding 27: bound_moiety = tetraethyleneglycol-cholesterol
gtgtgcggtatggtatttgattcacct

SEQ ID NO: 305 - RNA, 2374 nt, synthetic construct
  source 1..2374: mol_type = other RNA
ggcgaattaattccggttattttccaccatattgccgtcttttggcaatgtgagggcccggaaacctggccctgtcttcttgacgagcattcctaggggtctttcccctctcgccaaaggaatgcaaggtctgttgaatgtcgtgaaggaagcagttcctctggaagcttcttgaagacaaacaacgtctgtagcgaccctttgcaggcagcggaaccccccacctggcgacaggtgcctctgcggccaaaagccacgtgtataagatacacctgcaaaggcggcacaaccccagtgccacgttgtgagttggatagttgtggaaagagtcaaatggctcacctcaagcgtattcaacaaggggctgaaggatgcccagaaggtaccccattgtatgggatctgatctggggcctcggtgcacatgctttacatgtgtttagtcgaggttaaaaaacgtctaggccccccgaaccacggggacgtggttttcctttgaaaaacacgatgataataccatggcgatcgccacaagtttgtacaaaaaagctgatgagcaagggcgaggagctgttcaccggggtggtgcccatcctggtcgagctggacggcgacgtaaacggccacaagttcagcgtgtccggcgagggcgagggcgatgccacctacggcaagctgaccctgaagttcatctgcaccaccggcaagctgcccgtgccctggcccaccctcgtgaccaccctgacctacggcgtgcagtgcttcagccgctaccccgaccacatgaagcagcacgacttcttcaagtccgccatgcccgaaggctacgtccaggagcgcaccatcttcttcaaggacgacggcaactacaagacccgcgccgaggtgaagttcgagggcgacaccctggtgaaccgcatcgagctgaagggcatcgacttcaaggaggacggcaacatcctggggcacaagctggagtacaactacaacagccacaacgtctatatcatggccgacaagcagaagaacggcatcaaggtgaacttcaagatccgccacaacatcgaggacggcagcgtgcagctcgccgaccactaccagcagaacacccccatcggcgacggccccgtgctgctgcccgacaaccactacctgagcacccagtccgccctgagcaaagaccccaacgagaagcgcgatcacatggtcctgctggagttcgtgaccgccgccgggatcactctcggcatggacgagctgtacaagcgttcagctttcttgtacaaagtggtgcgagctctcgagccaaccactgaggatctgtactttcagagcgataacgatggatccgaaatcggtactggctttccattcgacccccattatgtggaagtcctgggcgagcgcatgcactacgtcgatgttggtccgcgcgatggcacccctgtgctgttcctgcacggtaacccgacctcctcctacgtgtggcgcaacatcatcccgcatgttgcaccgacccatcgctgcattgctccagacctgatcggtatgggcaaatccgacaaaccagacctgggttatttcttcgacgaccacgtccgcttcatggatgccttcatcgaagccctgggtctggaagaggtcgtcctggtcattcacgactggggctccgctctgggtttccactgggccaagcgcaatccagagcgcgtcaaaggtattgcatttatggagttcatccgccctatcccgacctgggacgaatggccagaatttgcccgcgagaccttccaggccttccgcaccaccgacgtcggccgcaagctgatcatcgatcagaacgtttttatcgagggtacgctgccgatgggtgtcgtccgcccgctgactgaagtcgagatggaccattaccgcgagccgttcctgaatcctgttgaccgcgagccactgtggcgcttcccaaacgagctgccaatcgccggtgagccagcgaacatcgtcgcgctggtcgaagaatacatggactggctgcaccagtcccctgtcccgaagctgctgttctggggcaccccaggcgttctgatcccaccggccgaagccgctcgcctggccaaaagcctgcctaactgcaaggctgtggacatcggcccgggtctgaatctgctgcaagaagacaacccggacctgatcggcagcgagatcgcgcgctggctgtctactctggagatttccggtgccgactacaaggaccacgacggcgactacaaggaccacgacatcgactacaaggacgacgacgacaagtaatagaattctaggatctgactgaaaaaaaaaaaaaaaaaaaaaaaaaaaaaagtttaaagactagtccg

SEQ ID NO: 306 - RNA, 43 nt, synthetic construct
  source 1..43: mol_type = other RNA
attttgcagccagtccatgcttcgggacaggggactggcgggt

SEQ ID NO: 307 - RNA, 32 nt, synthetic construct
  source 1..32: mol_type = other RNA
gcctggggtgccccagaacagcagtattcttc

SEQ ID NO: 308 - RNA, 34 nt, synthetic construct
  source 1..34: mol_type = other RNA
tgcgccaccgacgatgttcgctggcgatcagaac

SEQ ID NO: 309 - RNA, 32 nt, synthetic construct
  source 1..32: mol_type = other RNA
caggcgagcggcttcggccggtggtcaccggc

SEQ ID NO: 310 - RNA, 34 nt, synthetic construct
  source 1..34: mol_type = other RNA
agcgatgggctcgtttgggaagcgcgcttttggc

SEQ ID NO: 311 - RNA, 32 nt, synthetic construct
  source 1..32: mol_type = other RNA
gtccacagccttgcagttaggcagcacagtgg

SEQ ID NO: 312 - RNA, 34 nt, synthetic construct
  source 1..34: mol_type = other RNA
atttgccccaacaggattcaggaaccgggccgat

SEQ ID NO: 313 - RNA, 32 nt, synthetic construct
  source 1..32: mol_type = other RNA
gtcttcttgcagcagattcagaccggctcgcg

SEQ ID NO: 314 - RNA, 34 nt, synthetic construct
  source 1..34: mol_type = other RNA
cgtcgaagccatctcgacttcagtcgtccgggtt

SEQ ID NO: 315 - RNA, 32 nt, synthetic construct
  source 1..32: mol_type = other RNA
gcgcgcgatctcgctgccgatcagagcgggcg

SEQ ID NO: 316 - RNA, 34 nt, synthetic construct
  source 1..34: mol_type = other RNA
cttcgatgccatcggcagcgtacccagacagcca

SEQ ID NO: 317 - RNA, 32 nt, synthetic construct
  source 1..32: mol_type = other RNA
gtcggcaccggaaatctccagagttcgataaa

SEQ ID NO: 318 - RNA, 34 nt, synthetic construct
  source 1..34: mol_type = other RNA
gaatgaccgatcgatgatcagcttggtccttgta

SEQ ID NO: 319 - RNA, 32 nt, synthetic construct
  source 1..32: mol_type = other RNA
gtggtccttgtagtcgccgtcgtgcggccgac

SEQ ID NO: 320 - RNA, 34 nt, synthetic construct
  source 1..34: mol_type = other RNA
cccagtggtgcggaaggcctggaaggtcgatgtc

SEQ ID NO: 321 - RNA, 32 nt, synthetic construct
  source 1..32: mol_type = other RNA
ttacttgtcgtcgtcgtccttgtagtctcgcg

SEQ ID NO: 322 - RNA, 34 nt, synthetic construct
  source 1..34: mol_type = other RNA
caatacctctggccattcgtcccagagaattcta

SEQ ID NO: 323 - RNA, 34 nt, synthetic construct
  source 1..34: mol_type = other RNA
agaagagtcagatcctgtcgggatagggccgctc

SEQ ID NO: 324 - RNA, 32 nt, synthetic construct
  source 1..32: mol_type = other RNA
ggcaaattttgacgcgctctggatgtgatcgc

SEQ ID NO: 325 - RNA, 32 nt, synthetic construct
  source 1..32: mol_type = other RNA
gtcggtggaaacccagagcggagccccggcgg

SEQ ID NO: 326 - RNA, 32 nt, synthetic construct
  source 1..32: mol_type = other RNA
aacgttctaggacgacctcttccaacgcttgt

SEQ ID NO: 327 - RNA, 32 nt, synthetic construct
  source 1..32: mol_type = other RNA
gacgacacaaggcatccatgaagcgagagctc

SEQ ID NO: 328 - RNA, 32 nt, synthetic construct
  source 1..32: mol_type = other RNA
gtaatggtaaataacccaggtctggctctgaa

SEQ ID NO: 329 - RNA, 32 nt, synthetic construct
  source 1..32: mol_type = other RNA
ctcgcggtataccgatcaggtctgaaagccag

SEQ ID NO: 330 - RNA, 32 nt, synthetic construct
  source 1..32: mol_type = other RNA
gattggcagtcggtgcaacatgcggcccagga

SEQ ID NO: 331 - RNA, 32 nt, synthetic construct
  source 1..32: mol_type = other RNA
gaccagcgacgtaggaggaggtcggcgcggac

SEQ ID NO: 332 - RNA, 43 nt, synthetic construct
  source 1..43: mol_type = other RNA
gaagcacaggggtgccatcggttaccgtgcaggaacagaggag

SEQ ID NO: 333 - RNA, 34 nt, synthetic construct
  source 1..34: mol_type = other RNA
agggtgtcacgtagtgcatgcgctcggatgatgt

SEQ ID NO: 334 - RNA, 34 nt, synthetic construct
  source 1..34: mol_type = other RNA
aagtcgattaatgggggtcgaatgggagcaatgc

SEQ ID NO: 335 - RNA, 34 nt, synthetic construct
  source 1..34: mol_type = other RNA
agcttgtgtcggatccatcgttatcgtttgtcgg

SEQ ID NO: 336 - RNA, 34 nt, synthetic construct
  source 1..34: mol_type = other RNA
atatagactcctcagtggttggctcggacgtggt

SEQ ID NO: 337 - RNA, 34 nt, synthetic construct
  source 1..34: mol_type = other RNA
accttgatttgtacaagaaagctgagacccaggg

SEQ ID NO: 338 - RNA, 34 nt, synthetic construct
  source 1..34: mol_type = other RNA
ccgtcctctccatgccgagagtgatcccagtcgt

SEQ ID NO: 339 - RNA, 34 nt, synthetic construct
  source 1..34: mol_type = other RNA
ttctgctgaactccagcaggaccattgcgcttgg

SEQ ID NO: 340 - RNA, 34 nt, synthetic construct
  source 1..34: mol_type = other RNA
ggcagcagttggggtctttgctcagccataaatg

SEQ ID NO: 341 - RNA, 32 nt, synthetic construct
  source 1..32: mol_type = other RNA
agcacggatgaactggcggactgggtgtcaaa

SEQ ID NO: 342 - RNA, 32 nt, synthetic construct
  source 1..32: mol_type = other RNA
gcttctcgcacggggccgtcgccgttacgtcg

SEQ ID NO: 343 - RNA, 32 nt, synthetic construct
  source 1..32: mol_type = other RNA
cggtcacggtagtggtcggcgagccgccctcg

SEQ ID NO: 344 - RNA, 32 nt, synthetic construct
  source 1..32: mol_type = other RNA
acagctcggatgttgtggcggatctcagggtc

SEQ ID NO: 345 - RNA, 32 nt, synthetic construct
  source 1..32: mol_type = other RNA
gcaccactgccgttcttctgcttggcacgggc

SEQ ID NO: 346 - RNA, 32 nt, synthetic construct
  source 1..32: mol_type = other RNA
agtacagagttgtggctgttgtagcgtaggtc

SEQ ID NO: 347 - RNA, 32 nt, synthetic construct
  source 1..32: mol_type = other RNA
taccgattccccaggatgttgccgtgtggtcg

SEQ ID NO: 348 - RNA, 32 nt, synthetic construct
  source 1..32: mol_type = other RNA
cttccacagcccttcagctcgatggcatggcg

SEQ ID NO: 349 - RNA, 32 nt, synthetic construct
  source 1..32: mol_type = other RNA
caacatcggccctcgaacttcaccagaagatg

SEQ ID NO: 350 - RNA, 43 nt, synthetic construct
  source 1..43: mol_type = other RNA
acagtgccgtcgtccttgatcggcgcgggtcttgtagtagaca

SEQ ID NO: 351 - RNA, 34 nt, synthetic construct
  source 1..34: mol_type = other RNA
ccacaactctggacgtagccttcggcggttcacc

SEQ ID NO: 352 - RNA, 34 nt, synthetic construct
  source 1..34: mol_type = other RNA
tgaatacggaagtcgtgctgcttcatcctccttg

SEQ ID NO: 353 - RNA, 34 nt, synthetic construct
  source 1..34: mol_type = other RNA
ggggtaccgctgaagcactgcacgcttgtactcc

SEQ ID NO: 354 - RNA, 34 nt, synthetic construct
  source 1..34: mol_type = other RNA
tgcaccgacacgagggtgggccaggtcggccatg

SEQ ID NO: 355 - RNA, 34 nt, synthetic construct
  source 1..34: mol_type = other RNA
tttttaacggtggtgcagatgaactttgaagttc

SEQ ID NO: 356 - RNA, 34 nt, synthetic construct
  source 1..34: mol_type = other RNA
accacgtcgtaggtggcatcgcccttgcacgctg

SEQ ID NO: 357 - RNA, 34 nt, synthetic construct
  source 1..34: mol_type = other RNA
ccatggtagctgaacttgtggccgtatgggggtg

SEQ ID NO: 358 - RNA, 34 nt, synthetic construct
  source 1..34: mol_type = other RNA
catcagctctcgaccaggatgggcatggttgtcg

SEQ ID NO: 359 - RNA, 32 nt, synthetic construct
  source 1..32: mol_type = other RNA
gcacgctcaggtagccaccccggtgaacggta

SEQ ID NO: 360 - RNA, 32 nt, synthetic construct
  source 1..32: mol_type = other RNA
ccgtccagtttttgtacaaacttgcaatatgg

SEQ ID NO: 361 - RNA, 32 nt, synthetic construct
  source 1..32: mol_type = other RNA
ccggacacttatcatcgtgtttttaggtttcc

SEQ ID NO: 362 - RNA, 32 nt, synthetic construct
  source 1..32: mol_type = other RNA
agcttgcccccgtggttcggggggacccctag

SEQ ID NO: 363 - RNA, 32 nt, synthetic construct
  source 1..32: mol_type = other RNA
agcttgccctcgactaaacacatgcagacctt

SEQ ID NO: 364 - RNA, 32 nt, synthetic construct
  source 1..32: mol_type = other RNA
agggtggtggccccagatcagatcttccagag

SEQ ID NO: 365 - RNA, 32 nt, synthetic construct
  source 1..32: mol_type = other RNA
gggtagcgttctgggcatccttcaggtcgcta

SEQ ID NO: 366 - RNA, 32 nt, synthetic construct
  source 1..32: mol_type = other RNA
gacttgaacttgaggtgagccattgtcgccag

SEQ ID NO: 367 - RNA, 32 nt, synthetic construct
  source 1..32: mol_type = other RNA
gtgcgctcatccaactcacaacgtttatacac

SEQ ID NO: 368 - RNA, 43 nt, synthetic construct
  source 1..43: mol_type = other RNA
gcttctttgcaggtgtatcggcactggggttgtgccgcccggg

SEQ ID NO: 369 - RNA, 34 nt, synthetic construct
  source 1..34: mol_type = other RNA
gtggcttttggccgcagaggcaccttgactcttt

SEQ ID NO: 370 - RNA, 34 nt, synthetic construct
  source 1..34: mol_type = other RNA
gtggggggttccgctgcctgcaaaggccccttgt

SEQ ID NO: 371 - RNA, 34 nt, synthetic construct
  source 1..34: mol_type = other RNA
cagacgttgtttgtcttcaagaagcccatacaat

SEQ ID NO: 372 - RNA, 34 nt, synthetic construct
  source 1..34: mol_type = other RNA
gaactgcttccttcacgacattcaataaagcatg

SEQ ID NO: 373 - RNA, 34 nt, synthetic construct
  source 1..34: mol_type = other RNA
gcattcctttggcgagaggggaaagcctagacgt

SEQ ID NO: 374 - RNA, 34 nt, synthetic construct
  source 1..34: mol_type = other RNA
gaatgctcgtcaagaagacagggcccaaaggaaa

SEQ ID NO: 375 - RNA, 34 nt, synthetic construct
  source 1..34: mol_type = other RNA
gggccctcacattgccaaaagacggtggcgatcg

SEQ ID NO: 376 - RNA, 23 nt, synthetic construct
  source 1..23: mol_type = other RNA
gaccgcagctcctcgcccttgct

SEQ ID NO: 377 - RNA, 32 nt, synthetic construct
  source 1..32: mol_type = other RNA
tggaaaataaccggaattaattcgcccaaaaa

SEQ ID NO: 378 - RNA, 174 nt, synthetic construct
  source 1..174: mol_type = other RNA
attgacggatttctcggctaggatgatggagcctgatgacggtgcggactcttccttcattattaacgtaggggtctcccagaatcgctgaaaacgggagcgcggcagccgcgacagtaccagttgagagtcgattcggtcggttaacatcgtaagcatcgtggcggtggtgtg

SEQ ID NO: 379 - RNA, 174 nt, synthetic construct
  source 1..174: mol_type = other RNA
actctcccccaccgcccacagagggccactcacgcatccccagtgggttttgcggaccctctcttctctcccgggccgcccctatcgctcgacctctccacacctgcaccacccccgccgtccgaacccaggcctaattgtccgcgcatccgaccctagcgtgttcgtggaacc

SEQ ID NO: 380 - RNA, 174 nt, synthetic construct; identical to SEQ ID NO: 379
  source 1..174: mol_type = other RNA

SEQ ID NO: 381 - RNA, 190 nt, synthetic construct
  source 1..190: mol_type = other RNA
ccaacaatgtgatcttgcttgcggaggcaaaatttgcacagtataaaatctgcaagtagtgctattgttggaatcaccgtacctatttaggtttacgctccaagatcggtggatagcagccctatcaatatctaggagaactgtgctatgtttagaagattaggtagtctctaaacagaacaatttacct

SEQ ID NO: 382 - RNA, 174 nt, synthetic construct
  source 1..174: mol_type = other RNA
tattttctgggcctgatgtacctatagagcatgcacctacacaggttttcccatttcctttggcccctacaacgccacaagtgtctatttttgttgatgggggtgatttttatttgcaccctagttattatatgttaaaacgtcgacgtaaacgtgtatcatatttttttacag

SEQ ID NO: 383 - RNA, 174 nt, synthetic construct
  source 1..174: mol_type = other RNA
gggtagtggctcgcgcccgtagtctggagaagcatcgccagggttgagtcgcggcagaacccggttcgcggacggccgcggcgagcgggacttggtcaccccgccgatttaaagacccacagccagccgacttctccagttacgggagcgagcccccttttttctttttgccag

SEQ ID NO: 384 - RNA, 174 nt, synthetic construct
  source 1..174: mol_type = other RNA
tttccagaactacaggcacagatcgcgctaaacgagtttcctcgtcgcgagacacttcagcggtcagatcacaggaatctataaaaactggaatcgaccgtgcacaagtggaaccaaaacatgaattaactattaaagtttcacaattaccggtgtgctgcataacgccgaaac

SEQ ID NO: 385 - RNA, 174 nt, synthetic construct
  source 1..174: mol_type = other RNA
tctattcaggtcccgatgtagtgttgcccacaggaccccctacatggccttatgcacctcaatctccttttgataccacccatgatgtagttatacagggctccacatttgcgttatggcctgtttattttttgaaacgtaggcgtcgtaaacgtattccctattttcttgcag

SEQ ID NO: 386 - RNA, 174 nt, synthetic construct
  source 1..174: mol_type = other RNA
cccggacgcctccgctgccggtcgctccaagggcccccccgggaaggcgggtctgtggaccgtagggcccttaaatttttagagcagcccccgcgtcggcctgtctccccgccgtgcgtggccttacaaatctgcaagtgccccaaatcggacacgggcctgtaatataccaac

SEQ ID NO: 387 - RNA, 174 nt, synthetic construct
  source 1..174: mol_type = other RNA
ttgtagtttttaaatcctgttttgtaccattgtatatgtgttatgaatgagatgttctaaaggatgggcaagtagccaatgattcttaattcttaaagcgtgtgattcagtatctgtttttataatacggagagctatcgtgctgagcggaacagagctttggctgtgacgaag

SEQ ID NO: 388 - RNA, 174 nt, synthetic construct
  source 1..174: mol_type = other RNA
acgcgaggctgaacctcctgaatcactgcatctttcttgaggcgtttaaagaagagaatagtggccagggcctcggtggggtccagcgtgaggtcttatttttgaaaagggatattataaaacaggtcattgctcggattgtggcagccgatagcaccctagatctagtgaatc

SEQ ID NO: 389 - RNA, 174 nt, synthetic construct
  source 1..174: mol_type = other RNA
gcctcgaactggcttttcagattgtccacggtccagggcacaaagtcctccatctttggagttctgcccgcgatctgtgccacctctgttacgccactcctcgtgagggggcagctggacagtctttttccggtcagggggtttggctcgtttgcgctcgtgactttgtgagcc

SEQ ID NO: 390 - RNA, 174 nt, synthetic construct
  source 1..174: mol_type = other RNA
acaactccgactgtccgctggtggccatcgtcgagagcggccccgacggctgcatcggaccccgctcggtcgtggtttacgaccgagacgttttttccatcctctactcggtcctgcagcacctcgcccccagactagcgggcggcgggagcgacgcgcccccgtaggcccgcc

SEQ ID NO: 391 - RNA, 174 nt, synthetic construct
  source 1..174: mol_type = other RNA
catacgcaggggctggacgtggttaccggtcactggactcggtttcgctgtagctgtggttcaacctgaacatggctcccagagctgctaggaaccggtccagtcacattttttggtgggtggggggtactaaaaaagtatttaatattggggtttaatgataaaatccaggtt

SEQ ID NO: 392 - RNA, 174 nt, synthetic construct
  source 1..174: mol_type = other RNA
ttgctctcatgcttataattataattttgatcatctttatcttcagaagagaccttctctgtccacttggagccctttgtatactcctactgatgagtaagtattacaccctttgccccacaccccctttcccttactcttccttctctaacgcactttctcctctttccccag

SEQ ID NO: 393 - RNA, 174 nt, synthetic construct
  source 1..174: mol_type = other RNA
tcggttatcttatgtctgattcttattctacacatcttcaatgttcgatatgggggtacgaagccctgaattttacaccgattccagcacttttttgcgttgcttaaaaacagtaatttagtcggcacacgtacaatattaaactaggcttcttctaattgcgcagtgtttaaa

SEQ ID NO: 394 - RNA, 174 nt, synthetic construct
  source 1..174: mol_type = other RNA
aaacatatgtaaatgacagtagagatgttagaagacaaccaatcaggtataggcacgcccaattacaaagacacgaaattggtcaaatacttttaaatgatctgcaacaattgctttccattataactatttcagatttagagaaggatccatattctgtatttcgggtgtaac

SEQ ID NO: 395 - RNA, 174 nt, synthetic construct
  source 1..174: mol_type = other RNA
aagacataggactaaccgctttgggggacaacattgaaaatgaattgcaggaaatagatttattaactgcggatggtgaagaagaccaggagggcagagacctgcagttggtattttccactggcaatgatgaggtggttgatattatgactatacctatacgtgcaggcgggg

SEQ ID NO: 396 - RNA, 174 nt, synthetic construct
  source 1..174: mol_type = other RNA
cacccacaccggaggtgagctccgaggtcctcagtcatctgggatttattacggtccctgggaggtggtggggttaatagctttaggcttagtagcgggtgggcttttggctctttgctacctatacctcccttgcttttcctacttagtggtgctttgttgctggtttaagaa

SEQ ID NO: 397 - RNA, 174 nt, synthetic construct
  source 1..174: mol_type = other RNA
acaataaaatattcggtaacaatgatctctggagacttaccaggagtttggacagctcaatgacagtgtccatctcgtcgcttgtcagctttctgtgtgggtaaaaaaaggactattaaacattgagtcttggcgaagacgagcagttttgtttttgagtttgttttctaaaag

SEQ ID NO: 398 - RNA, 174 nt, synthetic construct
  source 1..174: mol_type = other RNA
gacattgcagtttcttccccttcctcttctgaaacatcgaacgatgagtgatttcgcccatgtaacaagaactgggatgaaccctggggcaacagactgcggggaggaggggggcagtgataagtcatgacaattttagatgaggtagaaattttgcatattttcagacccacc

SEQ ID NO: 399 - RNA, 174 nt, synthetic construct
  source 1..174: mol_type = other RNA
ctgtaccctctacatctttatcaggttatattcctgcaaatacaacaattccttttggtggtgcatacaatattcctttagtatcaggtcctgatatacccattaatataactgaccaagctccttcattaattcctatagttccagggtctccacaatatacaattattgctg

SEQ ID NO: 400 - RNA, 174 nt, synthetic construct
  source 1..174: mol_type = other RNA
tctatctaataatagttgccaacaattattagacatagagacgtgacaaccgactacggtgcatataaaagagctgatcagcacagatttgaaggagactgatggagcctcagagagctaaaaatttggtggactattgcaagcaacaacagattagtttttttgaattagagc

SEQ ID NO: 401 - RNA, 174 nt, synthetic construct
  source 1..174: mol_type = other RNA
acagactttcccgttagtggtttcctctcctcagggaggtcgtccatatccgtgctggttgtggaggtgcttgattcgtcgtccgagctccccaagtcccacctgcctcccctagtcacagaggccttttctccgccgcgccccaccgagtccgctccaaaaccgccttctgcc

SEQ ID NO: 402 - RNA, 174 nt, synthetic construct
  source 1..174: mol_type = other RNA
gtcatggccaaatttctagatttgcatgaaatattgaaggatgcttaatacatggggaaaataaacgcattaataagtcgtcagggggtggatcactccaaactcctcctatatcccacgataaatggtctaaatacttcacgcgtgtgccttggtttgcaaccttagatcaat

SEQ ID NO: 403 - RNA, 174 nt, synthetic construct
  source 1..174: mol_type = other RNA
cttcatccacaaacagaagattaaaatcttgacctcggataccctggaacgatagaaagatatatagttaccccaccaaagtttaaatgtatccttaaataccacgtacgtaaaaaatgtttgaatacgtacatatttcttttttttttccagtacaaccatatccggtgtata

SEQ ID NO: 404 - RNA, 174 nt, synthetic construct
  source 1..174: mol_type = other RNA
attctctatggcctcctagcaaggacaacatcgtaacgttctccattgcttattgcttgtgcgcttgccttcttactgctttactgtgcgtatgcatacacctgcttgtaaccactcgcatcaaaaacgccaataacaaagaaaaaatgccttaacctctttctgtttacagac

SEQ ID NO: 405 - RNA, 174 nt, synthetic construct
  source 1..174: mol_type = other RNA
tcagtcgcggttagtgacgtactcggacccttttcccttaaagagcctgacgggtgtgcgcgagtacatccagatttgagcgtcgagcggaggacgcggaataaaacgtgtcgcacaaagaactctctttctctgcttcttttctggggtgtctagctggcggcctcttttgac

SEQ ID NO: 406 - RNA, 174 nt, synthetic construct
  source 1..174: mol_type = other RNA
atcaaatccatatttgtaagttatgtttaacccctcccctttttgtcattatctccgccctcttataatcggatcactttataagtgtgtcggtgagtatattttgtacagttgttggacaacaggtttttggttcattaacactatcaacataagtcggggtatacaagtata

SEQ ID NO: 407 - RNA, 174 nt, synthetic construct
  source 1..174: mol_type = other RNA
gacttctgtttttagtccaattataataaaggattgtttatgcgtgcagacgacaatttctacaactcagatgctgccaggtacaaagagctcagcgatatttccggtatatgaccttcgtaagctgctcagtgcacttgtcatttcggaaggtagcgtcagattcgatatata

SEQ ID NO: 408 - RNA, 174 nt, synthetic construct
  source 1..174: mol_type = other RNA
aagcttacttgctatctgatttgattggtagacctttgagtgaaatcgcaattcgctgtgaaaattgtatgtgtttgttggattatattgaaaagtacgattgtatttgtcacggtggttattttcatttagttagaggtaattggaggggctgttgtagaaattgttacgaac

SEQ ID NO: 409 - RNA, 174 nt, synthetic construct
  source 1..174: mol_type = other RNA
tctgacgcataataattgttggcaacaatcgtgcataataacttaggaaccgagacagtatcatataaatactgctgaacagtagatttcttcagaagctgatggagccacaatttcctactgatttggattcatactgcaaatattttaacataagcttttttgacttagttc

SEQ ID NO: 410 - RNA, 174 nt, synthetic construct
  source 1..174: mol_type = other RNA
gaaaatttgtaagacgctgaactttgtctcgatctagccacgcaaacgggatcgactgcgctttcaaatccatcttttagaaaacaaactcaaaaacaaaactgctcgtcttcgccaagactcaatgtttaatagtcctttttttacccacacagaaagctgacaagcgacgag

SEQ ID NO: 411 - RNA, 174 nt, synthetic construct
  source 1..174: mol_type = other RNA
tcggaatccaaaggacgcagaccacctttggttacggacccctttctcccccccttccgaacaaaaagcagcgggcggggggccggggtgagggagggacacgggggacacggcgcgggggtcccgcctcacgccccgcgccctctaaatcccccccgttgctttgtcaagcag

SEQ ID NO: 412 - RNA, 174 nt, synthetic construct
  source 1..174: mol_type = other RNA
gtggccccctaccaaggaaaacatggttgggttttctttggcttttgtgatcatggcctgctttatgtcaggtctgctggtaggagctctagtgtggttcctgaaacgcaagcccaggtatggaaatgaggagaaggaaaaattgctataaattctttttcttttcacagcacc

SEQ ID NO: 413 - RNA, 174 nt, synthetic construct
  source 1..174: mol_type = other RNA
tataattacttttttacatgtgtcccaatccctgttaaaagtatatatattatatgtgtgtgtgttttatattcctatggcactggtacattaccatgctaccttgcaagtaacataaatattttcatatatatacaataaatttattgtttgtgtaccagtgtgtagtttacc

SEQ ID NO: 414 - RNA, 174 nt, synthetic construct
  source 1..174: mol_type = other RNA
atgataaatataagtttttgtacagtagaattgcaatatttgaatttaaacataagttcccattcaaagaggatggtacccctgtatttcaacttactgaccaaagctggaaatctttttttgaaaggctttggacacaattagagctcagtgacccagaagacgaggcagaca

SEQ ID NO: 415 - RNA, 174 nt, synthetic construct
  source 1..174: mol_type = other RNA
ccgtcgtgccaaggttcgactggacaacgtcacccagacacactccgggggggaggcccaaatctatctcttgccgccagcgctctggacagccttccagagggtcaccgaggcgcttgtaagcgtggttgccgcgtccaaaaaggtttataccgcaacacgtccaggtgtacc

SEQ ID NO: 416 - RNA, 174 nt, synthetic construct
  source 1..174: mol_type = other RNA
ttatgcgggtgatttattgaacggctttttttgtttagtcgtgtgttgcatgtattttggtgtgtgattagacaatttatcgtgcttgttttggtggacaccaataaaattttttgcagtattaatgtttttcaaatttgtgtttatttgctctgagccgggcagttcatcgtt

SEQ ID NO: 417 - RNA, 174 nt, synthetic construct
  source 1..174: mol_type = other RNA
tctcctctgtagtttctttacaactgtatgcgcgccttaattttagttggaataagtatactgatgatcttcccgaatatccaaacccccaggatgatttacccctaaatattgtatttccagagcccccgcgtcctccttctgttgttagctattttaagttcaccggtgaag

SEQ ID NO: 418 - RNA, 174 nt, synthetic construct
  source 1..174: mol_type = other RNA
atgtacaaagcggtgatgatgatacatggaccaaggtgtctggccatgtggaccatgcaggactatactttacacacgaagggacacgtgtaacctatgttaggtttgcacaggaagcacagacatatgggaacactggcacctgggaggtgcatgtgggaggacagctaattt

SEQ ID NO: 419 - RNA, 174 nt, synthetic construct
  source 1..174: mol_type = other RNA
attgttatttagtagaataaacatctttttatataacaaaaacacaaagtacatgactttagaaagccaactaaatgcattattatttaaaaattacagaatcaacgagtaatgtcactatagttttttaaagtaacttttaattgttcacttctagttgtaatcaaaagaagg

SEQ ID NO: 420 - RNA, 174 nt, synthetic construct
  source 1..174: mol_type = other RNA
cgagccacagcccctagccgtagacgaggtccatcacgccgtagacgtcgacgcaaagccactttagccccagcggcagtacgtcgcgttgtacaaagggggcgcacactaatacttccatccgtgcgttaccaccctagcattctctaacaagctgcgctgccgttttttcag

SEQ ID NO: 421 - RNA, 174 nt, synthetic construct
  source 1..174: mol_type = other RNA
cttcgggagacggaggcaaaactggaacgcgatccggcacttgaacattcttgcgcaacttctttttgggaggaagtgacggggcccgttctggactcgtctcctgcaagtagggagtgatggtggggagttcttgctgacggccggccatgctttactcctaggcgagaaaat

SEQ ID NO: 422 - RNA, 174 nt, synthetic construct
  source 1..174: mol_type = other RNA
acggcggctcttggattcggcattggtgcgccgcgtcttggcctgcatgatcatcgtcatcatgatcgccattagcatctggatcctgacctacgtgctgtttctctaataagaaccccggcccctgacggtaattttcctttcttctccgtttctcctcagctgccgtacgtg

SEQ ID NO: 423 - RNA, 174 nt, synthetic construct
  source 1..174: mol_type = other RNA
tatatgtattgtatacacagtgtatgtagacacatgtagtgggtttgtgggtgtcatacatttattgggtgtggggtattcattatagtggtgtggtttggtgttttgtttttggctttttgtatggtttgtatttttcatttttttacattatattgctaaataaattttagt

SEQ ID NO: 424 - RNA, 174 nt, synthetic construct
  source 1..174: mol_type = other RNA
cggtgagtgtcttcccgtactgggggaggcccaaggcgggtacgccctggtctgtagcatgtatctgcacgttatcgtctccatctattcgacaaaaacggtgtacaacagtatgctatttaaatgcacaaagaataaaaagtacgactgcattgccaagcgggtgcggacaaa

SEQ ID NO: 425 - RNA, 174 nt, synthetic construct
  source 1..174: mol_type = other RNA
actgtcggtggtgctttttaatcacggtgaccagtttttttacggtcacgccggcatggccgtagtccgtcttatgcttataagggttgtttttcctgttgtaagacaggcttctaatgtttaaatgtttttttttgttattttattttgtgtttaatgcaggaacccgcagac

SEQ ID NO: 426 - RNA, 174 nt, synthetic construct
  source 1..174: mol_type = other RNA
ggagctcttataatttttatttgttcagaaaaggttttaaaatgaaccattgaagcatcttgcaaatacactgaaacgttttgtgcaaagtggcaatccaacaaattttgtccaaaccattccaaaaataattgatcattttgaagctgagtttccatttgacagatccccaca

SEQ ID NO: 427 - RNA, 174 nt, synthetic construct
  source 1..174: mol_type = other RNA
cgcttatgtttgtttgccttattattatgtggcttatttgttgcctaaagcgcagacgcgccagaccccccatctataggcctatcattgtgctcaacccacacaatgaaaaaattcatagattggacggtctgaaaccatgttctcttcttttacagtatgattaaatgagac

SEQ ID NO: 428 - RNA, 174 nt, synthetic construct
  source 1..174: mol_type = other RNA
ggccgacactcgcgatggcctcggttccagggctgtaatcactttaacctagccaacgactatttgactcgccaccggcgtgagactgtggactggggcctgttggagcagtaaaggcaataactcgtgtgctttgtaaatttccgcccctagcggtcaaccccgtacaaggcc

SEQ ID NO: 429 - RNA, 174 nt, synthetic construct
  source 1..174: mol_type = other RNA
acggaaaacagcggaaagtattatttcaaacgagaagatgtgaattccaccttttattactcttgttacaacctgaccgtgacctaaacgcatgtaaagttccacagagccgcgtggctgtagctattgtgtttacgttgcttttgaaatgttaagcgtccctacggcgctaac

SEQ ID NO: 430 - RNA, 174 nt, synthetic construct
  source 1..174: mol_type = other RNA
agtttagtgatgcactgccacttctcatcaaaattgtccataaatttcaagtttttcaccatgtcagcaatctgatcggctctgacgtaggtggaaggatacttgtaagtttcatactcataatctatcagtctgttccacactacgcagtccgaagagggatgtagtccttta

SEQ ID NO: 431 - RNA, 174 nt, synthetic construct
  source 1..174: mol_type = other RNA
aaccagggacgtttggcctgctgcagcttcctttatacaaggagtaggtaacttcttatctaatactgcccaggggatattcggctcagcggtaagcctcctattctatgcaaaacctattttgataggaataggagttatactgcttattgcccttctttttaagataatatc

SEQ ID NO: 432 - RNA, 174 nt, synthetic construct
  source 1..174: mol_type = other RNA
acattatgcgattagatgaattcaaatatctgcaaaccagaacaatgtatgtgtactttaacaagccatttcctcttaaaggaaatgggcaaccgttatattacattgatggttatacatggaactctttttttaggaaattttggcgtcacctaaatctaaaagaccctgagg

SEQ ID NO: 433 - RNA, 174 nt, synthetic construct
  source 1..174: mol_type = other RNA
gaaaccctaaacgttcctgctctcacagatcacgggaccctgccgctgcgcagcagtatccggggagtccagcgcgtgaccgttactgacgccagacgccgcacctgcccctacgtctacaaggccctgggcatagtcgcgccgcgcgtcctctcgagccgcaccttctaaaaa

SEQ ID NO: 434 - RNA, 174 nt, synthetic construct
  source 1..174: mol_type = other RNA
cagacaagcaccccacccatcccagaaaccgcacggccgagaatcgatccccagcattcaaaatgcgttattaagaaaaaacatatgatgaagattaaaaccttcatcaacattgcacagactttgatccttaggagtttattctagctatctacaaaacgggtccaaaacgga

SEQ ID NO: 435 - RNA, 174 nt, synthetic construct
  source 1..174: mol_type = other RNA
cgaacactgccccgatccagtgttaatttggggcagaggttcagtctgtgtttactctcaaacctatgatgccgctagatggctaccagaacggttagtaagacaggtgtctaacaataaccaatccagggagtgattctctccctgagatcgctctttcccttgttcacagat

SEQ ID NO: 436 - RNA, 174 nt, synthetic construct
  source 1..174: mol_type = other RNA
cacagtttacctgctttacggatttgtcacccttatcctcatctgcagcctcgtcactgtagtcatcgccttcattcagttcattgactgggtttgtgtgcgcattgcgtacctcaggcaccatccgcaatacagagacaggactatagctgatcttctcagaattctttaatt

SEQ ID NO: 437 - RNA, 174 nt, synthetic construct
  source 1..174: mol_type = other RNA
gtggatcccatggacgagcccacccttctttatgttttgtttgaagtctttgacgtggtccgtgtgcaccagccgcaccgcggcgtcatcgagaccgtgtacctgcgcacgcccttctcggccggcaacgccacaacataaaagaagcaagcaacatcaacaacagctgccgcc

SEQ ID NO: 438 - RNA, 174 nt, synthetic construct
  source 1..174: mol_type = other RNA
tgtggcttgcccttctcttgttcctggtggtcctatggctaaaaatttcggagaagatatgaatgagtacatacagttactgctaagggaggagcttagggattgcggcagagcaattgatattccacttgttaatctactacaggtgaaccaggagcagaatctgttggaatt

SEQ ID NO: 439 - RNA, 174 nt, synthetic construct
  source 1..174: mol_type = other RNA
taacctgtaaattagatgatggtgatacatggatggcattatggatgttacttacatttataactgtattgttactgttattggcgtttcattgtaggacattatatgtatacaaatatagtaagtaaaatactgtgtattaaataaatatttttatatttgcagcgccttgtt

SEQ ID NO: 440 - RNA, 174 nt, synthetic construct
  source 1..174: mol_type = other RNA
tgtttgtgttatatagacatcttggtgtattgtaacataatatgtggtagcctgtacggatcccacatagggggttgtatatcatatgttgttgttgtgtgtaccctagtgtgctattgtggcaccattctttttctatttttgtttttttttttacagttaaataaagcaacc

SEQ ID NO: 441 - RNA, 174 nt, synthetic construct
  source 1..174: mol_type = other RNA
accaaaagtacaaatatttgcacagcagagttaaatcctttgctttcaataacaaatttccacttgatgctaatcacaaaccacaatttgaacttactgaccaaagctggaaatctttttttaaaaggctttggacacagttagatctgagtgatcaagaagacgagggagagg

SEQ ID NO: 442 - RNA, 174 nt, synthetic construct
  source 1..174: mol_type = other RNA
taattctaattgctgtccttggctctagcatgatcctagtgagcatcttcattataatcaagaaaacaaagaaaccaacgggagcacctccagagctgagtggtgtcacaaacaatggcttcataccacacagttagttaattaaaaataaaataaaatttgggacaaatcata

SEQ ID NO: 443 - RNA, 174 nt, synthetic construct
  source 1..174: mol_type = other RNA
acttgaaatcagcaatacagtctttgtcaaaactttctaccagcagcacctcaccctcttcccaactctggtactctaaacgtcggagggtggcatactttctccacactttgaaagggatgtcaaattttatttcctcttctttgcccacaatcttcatttctttatccccag

SEQ ID NO: 444 - RNA, 174 nt, synthetic construct
  source 1..174: mol_type = other RNA
tggtcaacatcaaaggttatatcaaggcgcggaacggccttatcaaaacactcgcctccgcggatgcaacccgggtggtgtttgtgcaagaacccgggtgtctttgatctcgggatcctgctgacgtaagcgaccctttgcggtttcggtctccccacctccaccgcacacccc

SEQ ID NO: 445 - RNA, 174 nt, synthetic construct
  source 1..174: mol_type = other RNA
actgtttgctgacgatgcgaaaagatatggtacaactggagaatgggaagtaaaagttaataaggaaactgtgtttgctcctgtcaccagctccacgcctccagggtcgccaggaggacaagcagacacaaacaccacccccgcgacccccaccacctccacaaccgccgttga

SEQ ID NO: 446 - RNA, 174 nt, synthetic construct
  source 1..174: mol_type = other RNA
ttgtataagtgatttaggatttaccccagaagtgaaataattcttagaataaaagaccgactagaatatccttaaggctgtctaacgtgccacacagctagggttagcctgacatctggaacaagatcgatactaatatagggatttgtttcatactagctctctgcaaacaca

SEQ ID NO: 447 - RNA, 174 nt, synthetic construct
  source 1..174: mol_type = other RNA
gaatacggatttgtctccggagtgggtcaagagtttcgattttcgggagcactttgtgtaggcggcgcgtcccaccccctgggccaccagccgcgattcgtctgacgctgctcctatattaagctttcgcgcagcgcgctttatccgactcgctgtcgagacggctttgccggc

SEQ ID NO: 448 - RNA, 174 nt, synthetic construct
  source 1..174: mol_type = other RNA
gaggcttcctgcccgcgctgatccccatcatcgccgcggcgatcggggcgatccccggcattgcttccgtggcggtgcaggcctctcagcgccactgagacacacacttggaaattgtaataaacccgaatggactctgacgctcctggtcctgtgatgtgtttttgtagacag

SEQ ID NO: 449 - RNA, 174 nt, synthetic construct
  source 1..174: mol_type = other RNA
ataacgtcgggaatgtgtcagttcaacgctgtcttttttccctaacagtcgtagtatccttaacgcgatcgtagacgtttatgcgagactgccggtaacgctgtcgttatcgttatattttttatttttgttttccatttttaattttatctcggattccgcacagaaaataaa

SEQ ID NO: 450 - RNA, 174 nt, synthetic construct
  source 1..174: mol_type = other RNA
gagtaaacaggagcatagttgttcttcatcgatgaagtgtgaaacggttctgctattctttgaaagttgaacactttttgatctttccatattaaatagattacaaaaatgatgtgtaatggaactcggaattgtttctaaattctccgtgtcttttttttcccgtgaaataac

SEQ ID NO: 451 - RNA, 174 nt, synthetic construct
  source 1..174: mol_type = other RNA
acctacatgactagcatcaagcaaactaatttctttgagcaagagagttccgattacaccatgctggtggtagatgacctttgagtcagggtggctacttgctcaggtttctgggcataaattctcctgcctgcctctgctctggtacgttggcttctgctgctgcttgtgatc

SEQ ID NO: 452 - RNA, 174 nt, synthetic construct
  source 1..174: mol_type = other RNA
ctttgacgcggcgctccgcccaagcgccgcggagttgctgcgcctgccgctatttcaccctaagtgaccccgctccccccggggggcgtggaggggggggctggttggatgtttttgcacaaaaagacgcggccctcgggctttggtgtttttggcaccttgccgcccggcgtc

SEQ ID NO: 453 - RNA, 174 nt, synthetic construct
  source 1..174: mol_type = other RNA
ccgcaggtcacatgtgttaggtttcacagattctatatattactaactctatactcgtaattaacattagataagtagattaagaaaaaagcctgaggaagattaagaaaaactgcttattgggtctttccgtgttttagatgaagcagttgaaattcttcctcttgatattaa

SEQ ID NO: 454 - RNA, 174 nt, synthetic construct
  source 1..174: mol_type = other RNA
cgtggacgcggccctcggttgggcgacgcatgccagcccaacaaaatccgccggggtgccagtcccattcccgaaggcgtagcccgttaacttggctggcttggatggggagtagggccttttccattaccccaaggacctagcgcgcgggagtcgtggctttggggcgcatcc

SEQ ID NO: 455 - RNA, 174 nt, synthetic construct
  source 1..174: mol_type = other RNA
aatttcataaagatgttgaatggtttccggaattggtcgaagatataaataggatcttggtagatgcttggggcaggaaacctaaaatcgtgctgaacgcgtctttctttataaagtggctctcgtcgacaataagcagattgaagctctgtccgcgtatactctgagagggga

SEQ ID NO: 456 - RNA, 174 nt, synthetic construct
  source 1..174: mol_type = other RNA
ggctacgccttagcccaacaataccatcatctgtacggtcacccctcagaggaaagccttagaaaggtgttgaccaaacgatttgtgtgggaagatatgggacaacattgtaaggaaataactaacacctgtctaacctgtgcaaaatataaagttctcagagcaggaccacca

SEQ ID NO: 457 - RNA, 174 nt, synthetic construct
  source 1..174: mol_type = other RNA
taccagagacgtttggcctgcagcagctagagctcttcaaggcataggtaacgttttgtctaatactgcccagggaatatttggaactacagtaagcattttgtcttatgcaaagcctatcctgataggaataggtgttatacttttgattgcctttttatttaagattgtatc

SEQ ID NO: 458 - RNA, 174 nt, synthetic construct
  source 1..174: mol_type = other RNA
gtttcttccctccgtaggacccaaatagcggggaggcacgtagggtggcgccgctgccatcacggtttcgtaagagggaggtggtgtctcaggaaaagccactgtctgcagttccaccgcgcgcctcatttcacagctaacggaagaaggaaaataagacgaacactggtcgcc

SEQ ID NO: 459 - RNA, 174 nt, synthetic construct
  source 1..174: mol_type = other RNA
tggcagattcccaaactaatgaaagttgccatgcaacccgtctcgctcagagatcccgagtacgactaggcttttttttttgtctttcggttccaactctttccccgccccatcacctcgcctatactatgtgtatgatgtctcataataaagctttctttctcagtctgcaac

SEQ ID NO: 460 - RNA, 174 nt, synthetic construct
  source 1..174: mol_type = other RNA
gtcacaaacataaaattctgtgtaggcgtttcgatcattctcaacctagcgctcggggctgccgaactacacactgaaaacgcagtttttaccgcttcggaaaaaatctccttatcctgctctgtgagattcgccgccgcctgatagaccgccgccaacgtaaggtcgggctcc

SEQ ID NO: 461 - RNA, 174 nt, synthetic construct
  source 1..174: mol_type = other RNA
aacatgattgcaaatatcaatatttacagagtagagtgacagtgtttgaatttccaaatccatttccatttgacagcaacggaaatgctgtgtatgaattaagtgatgcaaattggaactccttttttaaaaggttggcgtccagtttagagctgcagacaacagaggacgagg

SEQ ID NO: 462 - RNA, 174 nt, synthetic construct
  source 1..174: mol_type = other RNA
actctgttgaaactgccaaggcaatgagtgccctgcagctgtgtttatttaatgtgacgtcatgtaataaaattatgtcagctgctgagtgttttattacttcttgggtggggacttggatatataagtaggagcagatctgtgtggttagctcacagcaacctgctgccatcc

SEQ ID NO: 463 - RNA, 174 nt, synthetic construct
  source 1..174: mol_type = other RNA
tttgtttttggatgtgcgcgtggaggctttgttggaagccaccgttgagcaccttgaaaatcgcatttcttttgatttagctgtgctttttcaccaacacagtgggggcgatagatgccatctgcgcgatctacaatttgaagtactgcgagatcgtttggaataaaaattaac

SEQ ID NO: 464 - RNA, 174 nt, synthetic construct
  source 1..174: mol_type = other RNA
atttgtacatgcggaggaaagcgtgtgagtcaaaacggaggctgaaatttaataaagtttgtcacaccactctgtttttttgcaatttcctgtcatgtgacggcgtctcgtatccaggtcttatatttcagatacctcattgtttcacttctagtgttattcggagttttcaag

SEQ ID NO: 465 - RNA, 174 nt, synthetic construct
  source 1..174: mol_type = other RNA
gcgggaaagttgtaaataaagcttctgcggttgtgacatcacaggagagtataaagcagttctatgaaaaagagaagtcattactgtccggtgtgaagttttggagactaagtgaaagacattgtcggtttgcgcttgtcggcatctgttttcttttagccttgtatttttgtt

SEQ ID NO: 466 - RNA, 174 nt, synthetic construct
  source 1..174: mol_type = other RNA
atgttaatgtaacaactgatgaatctctattttatttgagaagtagacttacgtgtttcaattttccgaataagttaccaatgtctgacaaagatgaacctttgtttaccatttctgacaaaagctggacctgtttttttagaaagttttggaatcaattagaacttcaagaag

SEQ ID NO: 467 - RNA, 174 nt, synthetic construct
  source 1..174: mol_type = other RNA
cttcaacaatcagcattatcgctgcagtgacaattggaatatctattcttgtttttaccataacctactacgcctgctgctatagaaaagacaaacataaaggtgatccattacttagatttgatatttaatttgttctttttttttttatttacagtatggtgaacaccaatc

SEQ ID NO: 468 - RNA, 174 nt, synthetic construct
  source 1..174: mol_type = other RNA
ccataaggtgtaaacctgtgattgcgtgtgtggttaacgcctttgtttgctgaatgagttgatgtaagtttaataaagggtgagataatgtttaacttgcatggcgtgttaaatggggcggggcttaaagggtatataatgcgccgtgggctaatcttggttacatctgacctc

SEQ ID NO: 469 - RNA, 174 nt, synthetic construct
  source 1..174: mol_type = other RNA
taaggcagccagccaggcaccatacagcttctacgactgcaaagaagagagctggcacgtggggctcttccagatcaaacacggacctggaggggtctgtacaccaccttgccacgtagcgattagggccgaccgccacgaggaacccatgcaatcgtgactgtccgagcacat

SEQ ID NO: 470 - RNA, 174 nt, synthetic construct
  source 1..174: mol_type = other RNA
cttttgtttatcgaaatcagagctgtggctcttttagaagctgttgttgaacatttggaaaatcgcttacaatttgatctggctgtgatctttcaccagcacagcggaggcgatcgctgccacctgcgagatttacgcattcaaatccttgctgaccgtcttgattaagttttt

SEQ ID NO: 471 - RNA, 174 nt, synthetic construct
  source 1..174: mol_type = other RNA
ttccacagccgctcccaatacaattcctaaatcaacaattggcatcattactgccgtggtagtgggattaatgattatatttttgtgtataatgtactacgcctgctgctatagaaaacatgaacaaaaaggtgatgcattactaaattttgatatttaattttttatagaatt

SEQ ID NO: 472 - RNA, 174 nt, synthetic construct
  source 1..174: mol_type = other RNA
cgcgtgttattgtaggttcgttgccagatggcaagtgctgtcaacagcagacgttgtgggcggtcggtgtatttttgtgggttgcggtgagagtcggcactcggtgttttgtgagtgatctcaacagtttgtgttgcttttagcagcgtccaaaacagcgacgcgactttgggg

SEQ ID NO: 473 - RNA, 174 nt, synthetic construct
  source 1..174: mol_type = other RNA
ttgcagagcagctcttcggagcctcgctcgggaggcatcggaaccctccagttcgtggaggagtttgtgccctcggtctacttcaaccccttctcgggatcgccaggcctctacccggacgagttcataccgaacttcgacgcagtgagagaagcggtggacggctacgactga

SEQ ID NO: 474 - RNA, 174 nt, synthetic construct
  source 1..174: mol_type = other RNA
aacacagtttaacacatacagtaagcacagtaatctttttaggaataattggcttcagcattttgattattatagcagcctttatttatctgtgctggcatagaaaatctttgtgtgtttctaaaacagaacctcttatgccgattccttactagttttcttttttcttacagt

SEQ ID NO: 475 - RNA, 174 nt, synthetic construct
  source 1..174: mol_type = other RNA
aggagaagtattagaagttctaactcgtattcctttgagttctctttctgtacgctgttttgattgccttacattgttatcttttgcagaaaaaatagattgtataattagtggtcaaaacttttatcttgtaaggggtcgctggagatcatattgtagaaattgcattgagaa

SEQ ID NO: 476 - RNA, 174 nt, synthetic construct
  source 1..174: mol_type = other RNA
gtgtctcaatttgcatcttaatatacaatggagccagcaaaaccctctggaaacaacatgggatccaatgatgaacgtatgcaagagtaagtatgattagtcattattagatctatcttatttaagattatttgggaatttttctaagtacttaaaaaatatttatacttacag

SEQ ID NO: 477 - RNA, 174 nt, synthetic construct
  source 1..174: mol_type = other RNA
ggacgttctcgggggcagaggtggaggcgattgcgaagggctggggtccgacctggaaggcggatgactggcagaaccccttccgcgttcgggggtgtgctccctgtggcggtcgcttaactgatttccttcgcggctggccattgtgttctcctaggcagagaaacaacagac

SEQ ID NO: 478 - RNA, 174 nt, synthetic construct
  source 1..174: mol_type = other RNA
ttttaaataatagtaaacttaccagacgtcagccaatcagaggaggtcttgcgtctctacagtcgtccgagtatggagaaaaacttttacatgaccttagagcgttgttcttgatcacttcttctgcagatctggataaagatacatcatctctctttcagatgtgatatagta

SEQ ID NO: 479 - RNA, 174 nt, synthetic construct
  source 1..174: mol_type = other RNA
tctaggttttcagagctttctaaattggagatttcgttttctatgttcgtggggctggtggctgttgtcgtctcggaaggaattggtggttggggagtgaggtagcaatataacagaatctcgtttactatctcagattgtatagacaacgcttctgagtcccatcctttgtac

SEQ ID NO: 480 - RNA, 174 nt, synthetic construct
  source 1..174: mol_type = other RNA
ggctaaaaaaaatggcgcaatccatagtcgtagatggggactacgacgctcttgctagtagatatcttaaatttgtttatgattttgaaaatgtaacttatcaaaataattacttcgccacagataaatttaaaaaagacatagagcaatatcttaaatcaatccatgatggag

SEQ ID NO: 481 - RNA, 174 nt, synthetic construct
  source 1..174: mol_type = other RNA
tcttctataaattcagtggtacttgaggtcatttcattatccacacctaccgccgaagaggcctcataagtgacgttgttttctattgcacggggaacatttattaagtgggaggcaaataacaattctgaaaataacaaatcgttttttagcagaagggctggattataagcg

SEQ ID NO: 482 - RNA, 174 nt, synthetic construct
  source 1..174: mol_type = other RNA
aagacagatggaaatacttatatagtagaattagtttgtttgaatttccaaacccatttccattagataaaaatggaaatcctgtatatgtgttaaatgatgaaaattggaaatcattttttcaaaggttgtggtccagcttagaatttcaagaatcagaggacgaggaagaaa

SEQ ID NO: 483 - RNA, 174 nt, synthetic construct
  source 1..174: mol_type = other RNA
attctcaaatgattatattgaccaatacgtcttctaacagggggcaagtattctaaagacatattacccaaaatatctctatgattcctatcccgttatgtatttaatatgtaaagttaaggcgtagcctacaacaaacttcccgtttatcttccaggctctaaattggagaaa

SEQ ID NO: 484 - RNA, 174 nt, synthetic construct
  source 1..174: mol_type = other RNA
tctatgctctcccaaaaccggaggtgagctccgcggtcttcctactgacgacccctgggtggtagcgggttttgtaacgttaggagtagttgcgggtgggcttgtgctgatcctttgctacctatacacaccttgctgtgcatatttagtcatattgtgctgttggtttaagaa

SEQ ID NO: 485 - RNA, 174 nt, synthetic construct
  source 1..174: mol_type = other RNA
tagccatatatccataccttgacattggctggaatgccatagatgccatgaaccaccctactttcccagtgcccgctgtcataccactgcaacaggttattgccccaatcaatcagcctcgccccccttctcccacccccactgagattagctactttaatttgacaggtggag

SEQ ID NO: 486 - RNA, 174 nt, synthetic construct
  source 1..174: mol_type = other RNA
gctcgtccctctttaacgtcaacgatatttacgaactgttgtactttttagtgttggggtttcttccgagcgtggcggtgttgtaatttccaccacgtgtcgctcgctgcataaagggcgaacgtcctcggagagggtatattcgttcggcgagagcgggcggcggtggtgggt

SEQ ID NO: 487 - RNA, 174 nt, synthetic construct
  source 1..174: mol_type = other RNA
ggcaaaaaaagcccaacacgcaatgcgtttattgcaattcagttcactggtgcaatgagggtattggggctttttgaacgtgggaataacttgaatttcgcagatacctacgtatatacatggaaccaacagtactcgtatcatgaaaatgcattcctaatttcaaatcaagta

SEQ ID NO: 488 - RNA, 174 nt, synthetic construct
  source 1..174: mol_type = other RNA
ttgaaaaacatgtttggttagccattcatttttttaaagcatttcaggtttcaaaattaaaccacaaaaataaaacgcttatatctgatttcttaaaggatttcacacagctcttagcagatcaaaactttgaaattgtcgatcctacatttaccattcattattacgtttagc

SEQ ID NO: 489 - RNA, 174 nt, synthetic construct
  source 1..174: mol_type = other RNA
attatacctggtagagagtcagtgtccattttgccaggctatcatacgatttgtatgcgtagcaagcaacactgggatacggaatctacaggcactcctggtcaacagtcaccttgacctcgcttgtcacgcctgtgtcgagcagaatggcgtccagggtctcagacaccggca

SEQ ID NO: 490 - RNA, 174 nt, synthetic construct
  source 1..174: mol_type = other RNA
aaccctagccataaccgcataactctgttcacaaccctaacactaatcctcgcatccgcacctaacgctgcccctctttcacaccatcaccccctgccgcttcaacttcaccttcttcctccatctcgccccgcttgtttctacacttgtccgcccctctattcttactctagg

SEQ ID NO: 491 - RNA, 174 nt, synthetic construct
  source 1..174: mol_type = other RNA
gaaattcccctgtattgtaataagacctcattaacatatttcccctgcttagtactatgcagaaacccccgagcaaattaaaattgatgaagattaagaaaaagagggattttctcaggaaaaatcttttttcttaccttcatctcatttaaacaaatttaggactcaggaaaa

SEQ ID NO: 492 - RNA, 174 nt, synthetic construct
  source 1..174: mol_type = other RNA
ccccacggaaagagaatatcgtggtcttctccatcgcttacagcttgtgcacggtgctaatcaccgcgatcgtgtgcctgagcattcacatgctcatcgctattcgccccagaaataatgctgagaaagagaaacagccataacaccatttttttcacacacctttttcagacc

SEQ ID NO: 493 - RNA, 174 nt, synthetic construct
  source 1..174: mol_type = other RNA
agggagtctgggtatcctgggtatttcctgttttgtaggattgaaggaaataatatactttatctttgttagtgttgactacatgtggcctttttgtgatacgttattgactacggcggttaattgtttcttcaaaggccgtacctttcttcgacgtgaattaaaaatttaaaa

SEQ ID NO: 494 - RNA, 174 nt, synthetic construct
  source 1..174: mol_type = other RNA
ggttcccccccgtggctctcgagatgagccagacccaacccccggccccagttgggccgggcgacccagatgtttacttaaaaggcgtgccgtccgccggcatgcaccccagaggtgttcacgcacctcgaggacacccgcgcatgatctccggacccccgcaacggggtgata

SEQ ID NO: 495 - RNA, 174 nt, synthetic construct
  source 1..174: mol_type = other RNA
aattcttatactatctgttattctttattttatattctgccgtcaaatacccaatgttcatagaaattctaaaagacgtcccatctattctcctatgattagtcgtccccatatggctctgaatgaaatctaagatctttttttttttctcttacagtatggtgaacatcaatc

SEQ ID NO: 496 - RNA, 174 nt, synthetic construct
  source 1..174: mol_type = other RNA
tgccagtcccacgcttagccctggctctgaattgtcagctgtagtggcccaggacttaagtgactttttgcagctgacattgaggcgcgagctcagggcggagggcagaaccttattgaatcttgttgttttgaacacgctgcaggtggtggagcagcaggatctgtttctatt

SEQ ID NO: 497 - RNA, 174 nt, synthetic construct
  source 1..174: mol_type = other RNA
acagaacaccgcaactcggtgttgtactcgtgttttttattcaacaataaagctttttcacgcttactcgagtgtgacgtgactttatgggggaacgccgtgtgggaatgacggtgattatattacactctataaacggtttctcatacgcgccttttgatagccaccgccgtc

SEQ ID NO: 498 - RNA, 174 nt, synthetic construct
  source 1..174: mol_type = other RNA
ggctgactatcctgttctgtcctggaaaaactttcagcgtcgtaggtggactttgtagtatgcgggttagtgaagttatgtcatttatttacgtttacgatctcgtattacaaaccgcggagaggatgacaccgttcggccccatgagttatttttattcttccggtaggaggc

SEQ ID NO: 499 - RNA, 174 nt, synthetic construct
  source 1..174: mol_type = other RNA
taggttcgcgtgcggttttctgggtgttttttgtggactttaaccgttacgtcattttttagtcctatatatactcgctctgtacttggccctttttacactgtgactgattgagctggtgccgtgtcgagtggtgttttttaataggtttttttactggtaaggctgactgtt

SEQ ID NO: 500 - RNA, 174 nt, synthetic construct
  source 1..174: mol_type = other RNA
tcagcttacgatctcttgtcagatctcattaaatctaaactttttaaacaagattccctgttatccatgcttgtgagtgtggtttaatcataatcttgtattttactttccacacttttcatctctctgccagtgacgtgttggttgtcctcagcgtccctcccataggtcgca

SEQ ID NO: 501 - RNA, 174 nt, synthetic construct
  source 1..174: mol_type = other RNA
aggctttaaatccattagattggacacaatatttcatttttataggtgttggagccctgcttttagtcattgtacttatgattttccccattgttttccagtgccttgcgaagagccttgaccaagtgcagtcagatcttaacgtgcttcttttaaaaaagaaaaaagggggaa

SEQ ID NO: 502 - RNA, 174 nt, synthetic construct
  source 1..174: mol_type = other RNA
agatcaccaactttcggtgctgttgtttaatcacaatgacaggttttacgagggtcgagctggagaccctgtggcttgtcttgtgatggaaagactgatttttccacctgttcgacaggctactatgatatgacgcttgtttcttttattttgcagactaattcaaaactaaca

SEQ ID NO: 503 - RNA, 174 nt, synthetic construct
  source 1..174: mol_type = other RNA
aagtagatccaggaacagcagacagaatgatacacctatattattttaactgttttacagatagagccatccaacaggctatcagaggggagaagtatacgtggtgcacattcaaggaaggacataaaggtcaggtacaatcactgcaacttttggcactagttgcatatacaa

SEQ ID NO: 504 - RNA, 174 nt, synthetic construct
  source 1..174: mol_type = other RNA
attgtgctaaatgtaactgaggagctgagaagtgaccaccttaccctgtcttgcctgcggactgactatgagtcaagtgatgaagacgacaactgaggtaagtgggtggagctaggtgggattataaaaggctggaagtcaactaaaaattgtttttgttcttttaacagcacg

SEQ ID NO: 505 - RNA, 174 nt, synthetic construct
  source 1..174: mol_type = other RNA
gaggagctgaggcccgatcacttggtgctggcctgcacccgcgctgagtttggctctagcgatgaagatacagattgaggtactgaaatgtgtgggcgtggcttaagggtgggaaagaatatataaggtgggggtctcatgtagttttgtatctgttttgcagcagccgccgcc

SEQ ID NO: 506 - RNA, 174 nt, synthetic construct
  source 1..174: mol_type = other RNA
acatagcagaatctgaaaggtcaccattcaagattgattctacgtgtaagcattgtcattgtcgcgttagactgtgttgtgtcgccaccgacgcagctatccgtgtgtttgagtgccttcttcaatcagaattttcttttctgtgtcttaagtgctccaaagaattgctacgaa

SEQ ID NO: 507 - RNA, 174 nt, synthetic construct
  source 1..174: mol_type = other RNA
acacttatcataagaggtgttagttcctaaggataatcaatacacaatattccacgacaattggcgcccaacgtggggctcgaatataagtcgggatatttataaaaatattaattttaatccctagggaccttcgtgcactgcggaaggtataattctactgccttaatagaa

SEQ ID NO: 508 - RNA, 174 nt, synthetic construct
  source 1..174: mol_type = other RNA
cgttatccctcccaaatcgcctcctttgttttagcctggacccgggcttttgtctcagaatggtccgagatcttgtacgcagaggacagaggcacaccgttggaacagcgtaccctcaaatcagtttacggagacacagacagcttgtttgtcaccgaagccggataccgcctc

SEQ ID NO: 509 - RNA, 174 nt, synthetic construct
  source 1..174: mol_type = other RNA
tgcagtctgggcctgacataacttttcctactgcatctatgggaacaccctttagtcctgtaactcctgctttacctacaggccctgtttttattacaggttctgacttctatttgcatcctacatggtactttgcacgcagacgccgtaaacgtattcccttattttttacag

SEQ ID NO: 510 - RNA, 174 nt, synthetic construct
  source 1..174: mol_type = other RNA
atatcatccacatccgttacagtaaacaggaaaaagtgcaagtatctggacataggcaatttgttaagtgtaattgtttcagagattttttcagaaattattttcttgtttgtttcagatcttctggagggtagactttgcattttcgttgaagccttcggatgattaggaaaa

SEQ ID NO: 511 - RNA, 174 nt, synthetic construct
  source 1..174: mol_type = other RNA
aaaaggtcataccccgtaaacggcgggctccagtcccggcccggcggttggcgtgaacgcaacggcgggagctgggttagcgtttagtttagcattcgctctcgcctttccgcccgccccccgaccgttgcgcctttttttttttcgtccaccaaagtctctgtgggtgcgcgc

SEQ ID NO: 512 - RNA, 174 nt, synthetic construct
  source 1..174: mol_type = other RNA
tttcgtggaagacgtcgggaatatgtcgattcaacgttgtttgtttctaacagttgtagcatccttagcgcgatcgtagacgtttatgtgagactgccggtaacgctgccgttatcgttttttttattttttttttccttttaattttatctcggattccgcacagaaaaaaaa

SEQ ID NO: 513 - RNA, 174 nt, synthetic construct
  source 1..174: mol_type = other RNA
caaaggtcagggcccaagggggttcgcgttgctaggccaccttctcagtccagcgcgtttacgtaagccagacagcagccaattgtcagttctagggagggggaccactgcccctggtataaagtggtcctgcagctatttctggtcgcatcagagcgccaggagtccacacaa

SEQ ID NO: 514 - RNA, 174 nt, synthetic construct
  source 1..174: mol_type = other RNA
tgtagtacacagaatcgcaaacagtcagacgtctccgaacatgatcagaactcgccatcagaatcgtcagtggatgaaaacgaacccccttaaacacgttttccaacttaataaatgctacccacataaaatcacgtgctagctctgttttctttgttttgtcttccatagagc

SEQ ID NO: 515 - RNA, 174 nt, synthetic construct
  source 1..174: mol_type = other RNA
gtatatatgttgtgtttatatatattccattatttgtaattcatacacatgcatcttttttaagtcaacagtaacttttttacttgtgtatactgttgtttgtattggtattggtattggtattggtattggtattggtataataaacttttttactttttttttattattacc

SEQ ID NO: 516 - RNA, 174 nt, synthetic construct
  source 1..174: mol_type = other RNA
aattgctcccaccctcaattttcgcttgccttcttcccttgttaacctgatagcatagcctctaggtttccttgtaggtctgtttgggtttgttggttcacgtggtgctaacttgaattttttggttttctagttccctcttaattacatttgtgccagatcttgtagagcaag

SEQ ID NO: 517 - RNA, 174 nt, synthetic construct
  source 1..174: mol_type = other RNA
tgaatgcggattgcagctatgtcaaatcgcaatgcataaaactttcggaatgcgagtgtttatatacttttgcttctgatgtatgtaaggaagattttcataattccgaggaaatgaaggtgtttgttgtccaacattcgcaggaaatcgttggtggaacggatttttctgtac

SEQ ID NO: 518 - RNA, 174 nt, synthetic construct
  source 1..174: mol_type = other RNA
aagagattatgttagctgtgtactcaaactgtaaaattaagcattatttaagattaatctatatacggcagattaacgagctttcgcatttaatacatactcagaaacaaagtgatttgactttgacacctgatttaggatccacaaacccagaagattttcaatatccgcaag

SEQ ID NO: 519 - RNA, 174 nt, synthetic construct
  source 1..174: mol_type = other RNA
taaacgctcagtataaaaggccggtggacacgtatgatccttgcctaattctaacgggagaggcagaaagatatatggtggacgctgtgggaaattaccgggaagcctccactggaactaccgtactctaccccacgtatgatctgggctccatagttgcggacatggtgactt

SEQ ID NO: 520 - RNA, 174 nt, synthetic construct
  source 1..174: mol_type = other RNA
tctcagtcgtaagacgctcaactttgtctcgatctagccacgcaaacggaatcggatgtctttgcagatccatattttagaaaacaaactcaaaaacagaactgctcatttccgccaacattcaatgtttaatagtcttttttttacccacacagaaaactgacaagcgacgag

SEQ ID NO: 521 - RNA, 174 nt, synthetic construct
  source 1..174: mol_type = other RNA
acccgacgaaaaaaacatcccagattcaatgattgcaattgttgcagcggtggcagtggtgatggcactaataataatatgcatgcttttatatgcttgtcgctacaaaaagtttcatcctaaaaaacaagatctcctactaaggcttaacatttaatttctttttatacagcc

SEQ ID NO: 522 - RNA, 174 nt, synthetic construct
  source 1..174: mol_type = other RNA
cgctgagttactttggaagcgttcagcgcattggtcgttgcgcaacggaggacattaaatcgggttttctgcagtatcgtggaattaccctgccggtgataaagctagagaacatattcgttgacctttctgagaaaaaagtgttcgtatagcttctgagccttctgtctgaag

SEQ ID NO: 523 - RNA, 174 nt, synthetic construct
  source 1..174: mol_type = other RNA
tatacgtaaagagaacattgtggcattttccattgcttattgcttggtaacatgcatcatcactgctatcatttgtgtgtgcatacacttgcttatagttattcgccctagacaaagcaatgaggaaaaagagaaaatgccttaacctttttcctcataccttttctttacagc

SEQ ID NO: 524 - RNA, 174 nt, synthetic construct
  source 1..174: mol_type = other RNA
gaattccttcgcatgaacttaaatccgctccgggagcgccacgagcgcgatgacgtcattagtgagcacatactatcggctctgcgcgatccgaacgtggtcattgtctattaacccgccgtccccttacagttccaccgaacccggcccgggggactcactacccaccgcgag

SEQ ID NO: 525 - RNA, 174 nt, synthetic construct
  source 1..174: mol_type = other RNA
acttacttgaaatctgaaaccaggtctctgtccatgttttctgtcagcagcacttcgctcccctcttcccagctctggtactgcaggccccggcgggctgcaaacttcctccacactctgaaggggatgtcaaattcctcctgtccctcaatcttcattttttatttctattag

SEQ ID NO: 526 - RNA, 174 nt, synthetic construct
  source 1..174: mol_type = other RNA
ggcctggtgtgggacgacgaggactcggccgacgatagcagcgtgttggacttgggcgggagcggtggggtcaacccgttcgcgcatctgcagcccaaactggggcgacggatgttttgaaatgcaaaataaaactcaccaaggccatagcgtgcgttctcttccttgttagag

SEQ ID NO: 527 - RNA, 174 nt, synthetic construct
  source 1..174: mol_type = other RNA
gtcctacattccagttaatctatgggggcgtgatatattaagcaaaatgggtgtttatttatatagtccttcacccactgtgacagatttgatgttagaccaaggcttacttccaaatcaaggtttaggtaaacaacatcaaggcatcattttaccccttgatttaaaatctaa

SEQ ID NO: 528 - RNA, 174 nt, synthetic construct
  source 1..174: mol_type = other RNA
cattatttaatgtaaatgatacttatgatttcatctattttctagttttgggttttctgccaataccggccgttatataaggcgggatgttgtgttgattacgtcaatacggatggggttttggatataaagacttacagagcttttaaagaatcattacttcgtttattcagg

SEQ ID NO: 529 - RNA, 174 nt, synthetic construct
  source 1..174: mol_type = other RNA
ttcaagtaactctacaagcttgtctaatttttctggaattggggtcggggttatccttactcttgtaattctgtttattcttatactagcacttctgtgccttagggttgccgcctgctgcacgcacgtttgtacctattgtcagctttttaaacgctgggggcaacatccaag

SEQ ID NO: 530 - RNA, 174 nt, synthetic construct
  source 1..174: mol_type = other RNA
aagtgctaatacacctggtggtttttcttgaagaccattggaagaagtaaaagggggtgtaacaaagggtacgtctgatgtgtcaaatgggtcaaaagggtaaacggggttgaagtcatcattttcttctgtttcttcagcatactgggttctgctgcgcttcatctagaaaag

SEQ ID NO: 531 - RNA, 174 nt, synthetic construct
  source 1..174: mol_type = other RNA
tgggggatttgggagaaaatagtctattgcgtattttctgttcaataattggactgcgttatttaaaggtctgattggttgattgggttataaaaggaattactcctttaaattttacttaatgtacccacaatatcaagtggtcgtttgtatttaacgattattaccggtacc

SEQ ID NO: 532 - RNA, 174 nt, synthetic construct
  source 1..174: mol_type = other RNA
gactcgtatgtcctccagtcggacaagacgtggtcgtagctacagttggccaatgcattcttgtacaggtggataaatagctgtctgaaaaaaacacccgggtttcgcaggctgcagtgtagagtctgacctctgacataagaatacttgccttgcaggatctcaaagagggag

SEQ ID NO: 533 - RNA, 174 nt, synthetic construct
  source 1..174: mol_type = other RNA
tatatagtgggtcagacatttacacgcccacatcttccccgacatggccatcattgccccccccacccaccactaacttacctgcaatagttgtgcatggggataattattatttatggccctatatttatttaatccataaacgccgtaaacgtatgccttattttttttcag

SEQ ID NO: 534 - RNA, 174 nt, synthetic construct
  source 1..174: mol_type = other RNA
acctataaaacaggacatacaacgttacagaatagtgtgtggttgtacacagtgtggacggtcagttaaacttgttgtcagtagtacaggcgcggacatacaacagctgcatcagatgcttctggacacactgggcattgtgtgtccattgtgtgcctgcgtggagtgactgca

SEQ ID NO: 535 - RNA, 174 nt, synthetic construct
  source 1..174: mol_type = other RNA
aattacttaccggaaatctgaaaatacatcatggtctccgtgtactcttataaaatttccctcttcccaactgtcaaacctgacagacttgcaaacagcaaactttctccaaatcttaaatggaaggtcagattcttcttcccaatccctacccaccatcttcatcttttctag

SEQ ID NO: 536 - RNA, 174 nt, synthetic construct
  source 1..174: mol_type = other RNA
ctggttgtctgtgggatctttattcttgtggttcttctgtactttgtctgctgcaaagccagagagaaatctaggaggcccatctacaggccagtgattggggaacctcagccactccaagtggatggaggcttaaggaatcttctcttctcttttacagtatggtgatcagcc

SEQ ID NO: 537 - RNA, 174 nt, synthetic construct
  source 1..174: mol_type = other RNA
ttatgtgagcctgtgtgagctgacaaacttagtagtgtttgtgaggattaacaacaattaacacagtgcgagctgtttcttagcacgaagatctcgatgtctaagaaaccaggagggcccggcaagagccgggctgtcaatatgctaaaacgcggaatgccccgcgtgttgtcc

SEQ ID NO: 538 - RNA, 174 nt, synthetic construct
  source 1..174: mol_type = other RNA
gaagacaggaacttactgtgctgctttttaatcacagggaccgatttttgtatgtccgcaagggccacccagtgggtaccctgttgctggagagagtgatttttccttcagtaaaaatagccaccttagtttagtgcatgctttctgtttttcagactctcatctctactaacc

SEQ ID NO: 539 - RNA, 445 nt, synthetic construct
  source 1..445: mol_type = other RNA
accacaaacactccagtttgttacactccgctaggaatgctcctggagcaccccccctagcagggcgtgggggatttcccctgcccgtctgcagaagggtggagccaaccaccttagtatgtaggcggcgggactcatgacgctcgcgtgatgacaagcgccaagcttgacttggatggccctgatgggcgttcatgggttcggtggtggtggcgctttaggcagcctccacgcccaccacctcccagatagagcggcggcactgtagggaagaccggggaccggtcactaccaaggacgcagacctctttttgagtatcacgcctccggaagtagttgggcaagcccacctatatgtgttgggatggttggggttagccatccataccgtactgcctgatagggtccttgcgaggggatctgggagtctcgtagaccgtagcac

SEQ ID NO: 540 - RNA, 174 nt, synthetic construct
  source 1..174: mol_type = other RNA
ttttctataatacacgtggtttatttttataaaaaaaaaaggtcgtattcgtcatttgtgtggggaacgggtgtacaaaacggacgggaaaggctaactcgcgtttatatacttatatccgccaggaacgataaccgtgtccgctcaactttctaattgacatacggtaatacc

SEQ ID NO: 541 - RNA, 174 nt, synthetic construct
  source 1..174: mol_type = other RNA
tgtggctcctccagtggaccctgcaggaaccctggattattctgaattatcacgtgaatctgacgtaatatgtacagttaaataagtgcaacttttgcttatattttacatacaaacttgtgtgtaccatagatgaacacatttttatttgttttgaattattaaacttaagac

SEQ ID NO: 542 - RNA, 174 nt, synthetic construct
  source 1..174: mol_type = other RNA
agaattcgtcttgctctattcacccttacttttcttcttgcccgttctctttcttagtatgaatccagtatgcctgcctgtaattgttgcgccctacctcttttggctggcggctattgccgcctcgtgtttcacggcctcagttagtaccgttgtgaccgccaccggcttggc

SEQ ID NO: 543 - RNA, 174 nt, synthetic construct
  source 1..174: mol_type = other RNA
gtaatcaaggtagattttgtgctacattcactctttatggtaaatccaaacattatgataaatattttggagtaataaatggtttcacagcattcgctaatactgtagaggatgctgttaacaaactggttttcttagctgttgactttattacctggcgcagacaggagttaa

SEQ ID NO: 544 - RNA, 174 nt, synthetic construct
  source 1..174: mol_type = other RNA
acataacttcaagttcaacctcttccatgtcactgagacccagttcaaacccagagacactcagcccctccaccagtgacaattcaacgtcacatatgcctttactaacctccgctcacccaacaggtggtgaaaatataacacaggtgacaccagcctctatcagcacacatc

SEQ ID NO: 545 - RNA, 174 nt, synthetic construct
  source 1..174: mol_type = other RNA
ctatttcgttcttggatcaatatttaattgcagacgaggttttgtggaacgttgttcccgtaatttgttttttcaggcagtggggactcaagttagatttttttaaaaagttttcggggaagaccaagcggttgtcattttcgtttatatgtgatttgttcgctaggtctcagg

SEQ ID NO: 546 - RNA, 174 nt, synthetic construct
  source 1..174: mol_type = other RNA
cccgttacctttttaatatctatatagtttggtcccccctctatcccgcccaccgctgggcgctataaagccgccaccctctcttccctcaggtcatccttggtcgatcccgaacgacacacggcgtggagcaaaacgcctccccctgagccgctttcctaccaacacaacggc

SEQ ID NO: 547 - RNA, 174 nt, synthetic construct
  source 1..174: mol_type = other RNA
tatacccacgttttagtgggtgggacttaaaagaaatgggtggagggatataggggtgtgtcttcgttggtaccaattataaaaatgtactcgccacaactcacaatttagaacgcatggcagttctgctacgtgtttggatgcccggacattagaatacagccagttgttacc

SEQ ID NO: 548 - RNA, 174 nt, synthetic construct
  source 1..174: mol_type = other RNA
catgcgcaggcgcctgagtggcggctttctgcccgcgctcatccccataatcgccgcggccatcggcacgatcccgggcatagcttccgttgcgctgcaggcgtcgcagcgccgttgatgtgcgaataaaagcctctttagactctgacacacctggtcctgtatatttttaga

SEQ ID NO: 549 - RNA, 174 nt, synthetic construct
  source 1..174: mol_type = other RNA
ctttgcggtgtacctgattttcacatttgtgactgctacctgcgtctgcagtattattactctgctaatcacctcgctccaattttttgattactactacgtgagaattgtttaccgcagacaccacccccgttaccaaaaccctcaaattgcggctcttttgcagctccaacc

SEQ ID NO: 550 - RNA, 174 nt, synthetic construct
  source 1..174: mol_type = other RNA
caacacaattttcacatctagagtatcttttcaaaggaaaaatttcttcggggtatgtatggcaatgcattggaaaaatgctgcaatgttcatcaatagttaattgtgttttttttgttttatagaagtaccgtggactttcttgaagaaattgtgaagtctttataaaggacc

SEQ ID NO: 551 - RNA, 174 nt, synthetic construct
  source 1..174: mol_type = other RNA
ccttgccgtcctcggggggcgttacatagcccggatcttgctccacttgctcattttcctcctcatgtttcactagctcgacggcgccgacctcagagttgggggtggttaaggtttcggagtctggctgcagcttaagatcctcctccatattttctcgcctaggagtaaagc

SEQ ID NO: 552 - RNA, 174 nt, synthetic construct
  source 1..174: mol_type = other RNA
aactaaagacgtttggcctacaatctccaacttcgtttctggaataggtaatttcataaaggacactgctggaggtatttttggaactgcctttagttttctgggatatgtaaaacctgtacttttgggatttgtgataatattttgcataattttaattataaaaatcatagg

SEQ ID NO: 553 - RNA, 174 nt, synthetic construct
  source 1..174: mol_type = other RNA
gcaattccacccaatgaaaaaaacattccaaattcaatgattgcaattattgcggcggtggcattgggaatggcactaataataatatgcatgctcctatatgcttgttactataaaaagtttcaacataaacaggatccactactaaattttaacatttaattttttatacag

SEQ ID NO: 554 - RNA, 174 nt, synthetic construct
  source 1..174: mol_type = other RNA
aaattaaaacggttttcaccatgattaaccaaatcaattcccttacacaagaaaaaacgtttttcattgtggctgatgtttctgctgacaataggctggcaacttgtatatttaaagagtgaataaaaagttctttgaaatagtgtctgttgtaacagattttatttcagctcc

SEQ ID NO: 555 - RNA, 174 nt, synthetic construct
  source 1..174: mol_type = other RNA
tgtacttttccctggtgacgcagtttcggggtgtgtgttgggtttggcgggattttttacactttactcccattacgtcagtttagggcttgtgtatatatatattgtggagaggttggagagtcactttagagcttgtgctttgtgtgcccgctgtactttgtctggtaagcc

SEQ ID NO: 556 - RNA, 174 nt, synthetic construct
  source 1..174: mol_type = other RNA
gaatttcgaagtcgaccccatggatgagtccacccttctctatgttgtcttcgaagtcttcgacgtcgtccgagtgcaccagccccaccgcggcgtcattgaggccgtctacctgcgcacccccttctcagccggtaacgccaccacataaattcttgcttcttgcaagaagcc

SEQ ID NO: 557 - RNA, 174 nt, synthetic construct
  source 1..174: mol_type = other RNA
gtgggtgtggttgtgcatttcagtcgtgctcatctttgtggtgagtatgttgctattatgttgttgttctactggttgctgtggcttctttagttgttttgcatcttctattagaggttgttgtgaatcaactaaacttccttattacgacgttgaaaagatccacatacagta

SEQ ID NO: 558 - RNA, 174 nt, synthetic construct
  source 1..174: mol_type = other RNA
aattccctcagctactgtggcaatcgtggtgggagtgattgcgggctttgtaactctgatcattgtcttcatatgctacatctgctgccgcaagcgtcccaggtcatacaatcatatggtagacccactactcagcttctcttactgaaactcagtcactctcatttcagaacc

SEQ ID NO: 559 - RNA, 174 nt, synthetic construct
  source 1..174: mol_type = other RNA
ttgtagatctctcacgcattttagtgtcatgaattagtgtttcaaatcagttgcatatcaattaagaaaaacttaggagacaggtatagaacctctctttcagataactggtcaattaaggacagaaattctgtttctcaaatccgctagcctttgtcaaagaggacacaagca

SEQ ID NO: 560 - RNA, 233 nt, synthetic construct
  source 1..233: mol_type = other RNA
tgtgtgcccgtctgttgtgtgactctggtaactagagatccctcagacccttttagtcagtgtggaaaatctctagcagtggcgcccgaacagggacctgaaagcgaaagggaaaccagaggagctctctcgacgcaggactcggcttgctgaagcgcgcacggcaagaggcgaggggcggcgactggtgagtacgccaaaaattttgactagcggaggctagaaggagagag

SEQ ID NO: 561 - RNA, 174 nt, synthetic construct
  source 1..174: mol_type = other RNA
accgttgatcgggaaatgttcggatggtgtggttatgcacgtaaagaacattttgtagtgatgtaataaaatgttggcgccaaaaaaatacagtatataatgtgttggtcatttcatttgttttttaaagcacataaggcgcgagttggtgctaggacttcgttcttgacagag

SEQ ID NO: 562 - RNA, 174 nt, synthetic construct
  source 1..174: mol_type = other RNA
ctaataaattaagaaaaacttaggacccaagtcctttaaacgtgcatgattgagatagtcagaaattggagctaatttgaatactagtgagtaaattaggagtagtagtattgaaccacctcatatcttatttcttctgaactgcattaaaatttgtacccaggatataacaac

SEQ ID NO: 563 - RNA, 174 nt, synthetic construct
  source 1..174: mol_type = other RNA
gcgcggactaaaaacagggatgtactactgcaaggttcgcaaggcgaccaacagcggggtctttggcggcgacgacaacattgtctgcatgagctgcgcgctgtgaccgacaaaccccctccgcgccaggcccgccgccactgtcgtcgccgtcccacgctctcccctgctgcc

SEQ ID NO: 564 - RNA, 174 nt, synthetic construct
  source 1..174: mol_type = other RNA
aaaacagtgggtagaaaagatatttttacaggcgatttgttgaaccttttttattgttcagcttgctttgtaatttttttctaaagaaaatttgcagcttctaaatgtgctaaataaaaaaaaattgaaatatttatgcctttgttttttcttgggtaattttaaaactgaagc

SEQ ID NO: 565 - RNA, 174 nt, synthetic construct
  source 1..174: mol_type = other RNA
aaactaattatagatatttacacactacaataaaaggatttgaatttccaaatccttttcctatgaaagcagataatacacctcagttcgaactaactgaccaaagctggaaatctttttttacaaggctttggacacaattagacctgagtgatcaagaagaggagggcgagg

SEQ ID NO: 566 - RNA, 174 nt, synthetic construct
  source 1..174: mol_type = other RNA
atctggagaacatgctagacaattgggagatttcgcgcaccaatcttaagacttgtaaagaactacgtaaagccctcaccgaggcctcgagagcaaggcggaaacaaacaatttataaactgcaaggctcggatataagcctttccgttagtgaagttggagtttttgggcaac

SEQ ID NO: 567 - RNA, 174 nt, synthetic construct
  source 1..174: mol_type = other RNA
aacctctactggtggtaaacgtcctaccacttttcctatacctcaacctgttcccatgcagccatatgtaccttttgtaattgtggattcatttatttcttctgatacattttatttgcatccttccttggtacgtaaacgcaaacgacgggaccttgtttaattgtttttcag

SEQ ID NO: 568 - RNA, 174 nt, synthetic construct
  source 1..174: mol_type = other RNA
gatgtccacgtttcgaaagacgaaaaattcaatgtatcttgagctcgtttgtctctgtagggtaatcgtttcagagatcttttctgaaattacgctgtacatttttccaggtgacagagggctgtctgctgttaatcacgtcgacgcgaagactagttcaaaataacacttaag

SEQ ID NO: 569 - RNA, 174 nt, synthetic construct
  source 1..174: mol_type = other RNA
aggacagatggaaatatttgcgcagcaggctgacagtgtttacatttaagaatccatttccttttgcaagtccgggagagcccctgtacccgataaataatgcaaactggaaatgctttttccaaaggtcgtggtcccgcttagacctaaacagtccagaggagcaggacgaca

SEQ ID NO: 570 - RNA, 174 nt, synthetic construct
  source 1..174: mol_type = other RNA
atatgttttcaaaaaatcgagataaaaaacactttgcttcatccgaaatccaagcaaagggtaaatgtgacattttcatgactcgttttttctgttgagcattattgaacacttcttaaaaaattagtttaatagtctctattttctctttgattagatacatgcgctgccgac

SEQ ID NO: 571 - RNA, 77 nt, synthetic construct
  source 1..77: mol_type = other RNA
cagagagagtaacgcacaatcactactcaaacgacaacagcaaagcgcaatacatacggatctcaactgggcaataa

SEQ ID NO: 572 - RNA, 174 nt, synthetic construct
  source 1..174: mol_type = other RNA
tgtgggttcttttgtcatggttcctggcggggaagtggccgcgctggtccgtgcagacctgcacgattatgttcagctggccctgcgaagggacctacgggatcgcggtatttttgttaatgttccgcttttgaatcttatacaggtctgtgaggaacctgaatttttgcaatc

SEQ ID NO: 573 - RNA, 174 nt, synthetic construct
  source 1..174: mol_type = other RNA
ttgtatcgaatagtaaacttaccagacgtcagccaatcagagagggtctcgcgtctctacagtcgtccgagtatggagaaaaacttttacatgaccttagagagttgttcttgatcaattctactgcggatctggataaagatacatcatctctctttcatatgtgatatagta

SEQ ID NO: 574 - RNA, 174 nt, synthetic construct
  source 1..174: mol_type = other RNA
cgcccacggtctggccgtcatcgtcgcgggtaaccaaacctggtacgtgaatccgtttagcctggctcacctgctggatgcaatatataacgttttagggatcgaagacctgagtgccaacttttggcgccaactggctccttaccgtcacactctcatcgtgccgcagacttg

SEQ ID NO: 575 - RNA, 174 nt, synthetic construct
  source 1..174: mol_type = other RNA
gcattacgaacaaagggtgcaggtaagcttgtttggggaaagtgaaaactcccagaagcattaatcatgtgactaaacacgcccattgcggggttgggtgagcctataaattctacaacattggcggaagatacaggcaactgcaaacacgcaattgtcagatattttgcagcc

SEQ ID NO: 576 - RNA, 174 nt, synthetic construct
  source 1..174: mol_type = other RNA
agagtccgtgcgtggatgtcacggcggagcatatgagtcaattcttgcagtggtgccggagccttaaaaagaggttcaaggagagctacttcttcaactgtcgcccacggtttgagcaccctcatcttccaggtctggtagctgaactcttggcagacgacttctttggtccag

SEQ ID NO: 577 - RNA, 174 nt, synthetic construct
  source 1..174: mol_type = other RNA
cgaggtatcatttcgaaagacgaaaaattcaatgtatctcgagctcgtttgtctctgtagggtaatcgtttcggagatcttttctgaaattgcgctgtacatttttccaggtgacagagagctgtctgctgttaatcacgtcgacgcgaagactagttgaaaataacgcttaag

SEQ ID NO: 578 - RNA, 174 nt, synthetic construct
  source 1..174: mol_type = other RNA
aagtgctcttcctcacctgcccctgagtcactaccggttggggtaagaactgagggggcaaagtcatcaatctcagcgtaaaagttttcgtgtctttcgttttcaggggactcatcctcctgacattttcgccagccgccgggcgggccggcctcctttcctggaaatccagcc

SEQ ID NO: 579 - RNA, 174 nt, synthetic construct
  source 1..174: mol_type = other RNA
tggccctaccgctacccctctttcaacccctcaccatcacccaacccgctgccccacccacatcccccccaccgccaccgctaccgtcacctctgaacttcacctttttcctccatctcgccccacttctctctacatttctccgcccctctattcttactcctgttttctagg

SEQ ID NO: 580 - RNA, 174 nt, synthetic construct
  source 1..174: mol_type = other RNA
ccgagaatgtaacgggggtgtaaatagccagggggtttgttttaatttattaataaaaatgtgtattacgttactcatgtgtctccattacgcatcacagggggtatttatacccgataatatacaaaacgcgttttgtacctctaccgcacccgatatcttaacggggttatt

SEQ ID NO: 581 - RNA, 174 nt, synthetic construct
  source 1..174: mol_type = other RNA
ctcccaaaggagggatatgtggttctggtaggagacgagaacctaaaacagttcccgcctccgtctgaatttttgctttcggtttggaaccgaagccgcgccgcgcgtcttgtctgctgcagcatcgttctgtgttgtctctgtctgactgtgtttctgtagttgtctgaaaat

SEQ ID NO: 582 - RNA, 174 nt, synthetic construct
  source 1..174: mol_type = other RNA
gagtccccgcattctgccggggtaaaatccacggcgcgtttgttgaccatgttcagttgaacgactccgcccccgcgaatagctacggccgcttgccagtccccatcggcattccggttggtgctgtccgtctggacaaggatcgccctgggcccccactgactcatcgccgcg

SEQ ID NO: 583 - RNA, 174 nt, synthetic construct
  source 1..174: mol_type = other RNA
tatgcgcagacgcatgaagggtggggtgctgcccttcctaattccacttattgctgcggccattggagccgttcccggaattgcctcagtagccttgcaggcttctcgaaaaaattaaaataaaataaaacttccaacttattactggtactatgactgttttatgcagactaa

SEQ ID NO: 584 - RNA, 174 nt, synthetic construct
  source 1..174: mol_type = other RNA
ttggtagtaatggggtcagtgtacttgagtgctaaaactcccggggggttttcctgtaacccgtcggaagaaacgaagggcggagctacatagggaatgctgggagttgaggaggtgtcataggggtagacggggttgaagtcgtcttcaattctggttcttttcatctgcaag

SEQ ID NO: 585 - RNA, 174 nt, synthetic construct
  source 1..174: mol_type = other RNA
cttgggttgtagatatagtcaatcaactggtctgacaagtcataccccaaacaatccaaatctggaatcacctgttcgctcagtagtaatatcttggcaaacactacactaacctcgtctgtactgtctgaaagtggtcaggattgattgacagttattatttatctttaagca

SEQ ID NO: 586 - RNA, 174 nt, synthetic construct
  source 1..174: mol_type = other RNA
gtgtctggaaacttgctctacccgtagctaacgtgacatatgccctgttcattgtaattgtactggtagttgtattaggggcggtgcttttctggaaataaattgcctttccgtacatatcctgcgcagatgtacgtgtatgctgttatcgattgtcccgtaaactaataaacg

SEQ ID NO: 587 - RNA, 174 nt, synthetic construct
  source 1..174: mol_type = other RNA
aagacaggtggaaatttttacgtagtagactgcagctgtttacctttcctaatgcatttcctgtaaatcagaaaggggatcccttgtatacactaaatgatgcaaactggaaatgcttcttccaaaggttgtgggctcggttagacttacacgagcaggacgaccaggaggaca

SEQ ID NO: 588 - RNA, 174 nt, synthetic construct
  source 1..174: mol_type = other RNA
tgggactttgtccccattgcattaatgtaggggcttggtataatggatggaaatttcgagaatttaccccagatttggtgcgatgtagctgccatgtgggagcttctaatcccttttctgtgctaacctgcaaaaaatgtgcttacctgtctggattgcaaagctttgtagatt

SEQ ID NO: 589 - RNA, 174 nt, synthetic construct
  source 1..174: mol_type = other RNA
gcagagacatctttaaaatatttacatagtagactaacaggatataattttccacataaactaccagtagatagtaatggcaatgtagtgtacaagatcactcatgcagattggaaatgttttttagcaagctggagcagcagttagacctgtgtgaaccagaggacagtacag

SEQ ID NO: 590 - RNA, 174 nt, synthetic construct
  source 1..174: mol_type = other RNA
aggctacacagtgtcctatcccgagtctagacaaaccacagatataatttttccacatcctgacacccccacagtagtaatccacatcaatgatacatcaggagattattatttacacccaagtctccaaaggaaaaaacgcaaacgcaaatatttataattttgtttttgcag

SEQ ID NO: 591 - RNA, 174 nt, synthetic construct
  source 1..174: mol_type = other RNA
ctcagcctgcatatacgatcaaaaggaggatggcccccgctggctccctgagcgactaattagacacatcaataatcagacagcccccttgtgtgacaggccaagtaacccaaatacagccccagggccaaaaggctcgccctgaggagctccttttctcttcttccaggaaga

SEQ ID NO: 592 - RNA, 174 nt, synthetic construct
  source 1..174: mol_type = other RNA
cattggacggtagcagatgaagaattgttaaaaaatataaaaaatgaaacagggtttcaagcacaagcagtaaaagattactttactttaaaaggtgcagctgcccctgtggcccattttcaaggaagtttaccggaagtgcccgcgtacaacgcctcagaaaaataccccagc

SEQ ID NO: 593 - RNA, 174 nt, synthetic construct
  source 1..174: mol_type = other RNA
tcaactctcaagatccttcctcttcttactttgttccgctcctcgcctagtcccaacacagcaatcaccaaccagatcgaagaaaccgcggcaggtcgacccaactgagcaacatcgactgcaacttcacacaagcctccaactggcctccaacagataccgcaaagaacccaa

SEQ ID NO: 594 - RNA, 174 nt, synthetic construct
  source 1..174: mol_type = other RNA
tgaggtggaaaatcgtttttcttttgaccgtaaacctcatatagaaaacggtataattcaacttgtggtttactcttatgtttgatgacgcgtgttatgttacgtcaaacataatatataaggatttcaccacaaaaccccattatctctgtttctgtgatcaaatccacaaag

SEQ ID NO: 595 - RNA, 174 nt, synthetic construct
  source 1..174: mol_type = other RNA
gccattgtaactgtaacatatgatagtgaggaacaaaggcaacagtttttagatgttgtaaaaataccccctaccattagccacaaactgggatttatgtcactgcacctattgtaatttgtatatatgtaaatgtgtaaatatatggtattggtgtaatacaactgtacatgt

SEQ ID NO: 596 - RNA, 174 nt, synthetic construct
  source 1..174: mol_type = other RNA
gctagtattggatgtgcgcgtggaggctttgctggaagccaccgttgagcaccttgaaaatcgcatttcttttgatctagctgtgctttttcaccaacacagtgggggcgagagatgccatctgcgcgatctacaatttgaagtactgcgagatcgtttggaataaaaattaac

SEQ ID NO: 597 - RNA, 174 nt, synthetic construct
  source 1..174: mol_type = other RNA
acgagctgtatataaatcggcttgtttttggggcggtttgtacgctgggcacagttccctttgattctcatccggtgcaccaaagtctgaacgtgaagggcacgtccttgcctgtactggtgtttgcgaactttgaggccgcgtgtggcccctggactgtgtttctgtaaggtc

SEQ ID NO: 598 - RNA, 174 nt, synthetic construct
  source 1..174: mol_type = other RNA
ggtagtgtgtcccccccccctccaaccaatatggctgtcgtgtgtggttccgggttgcgcctccgtcctttccaccccccttccccctccttttttgttttgcgtgcgcttataagagcgggcccggggcccttcgcagcttcaccgagagcgccgtcgggccccgggtgcggg

SEQ ID NO: 599 - RNA, 174 nt, synthetic construct
  source 1..174: mol_type = other RNA
tgtttttttttttgttaacagtgtctgttttttttcttaaggtgcttttagagattatgccacacccatttccggagttgcagtattttttcgtataaatttaactaagattgtgcagttcttacatatttggatggccgattatcttaatcattaacgagaaaaaacatcgta

SEQ ID NO: 600 - RNA, 174 nt, synthetic construct
  source 1..174: mol_type = other RNA
ggcagaagcacagcattttcttgtgagcttcgagcactaataaaactgaaaatcaaaatgtccaacatggatattgacagtataaataccggaacaatcgataaaacaccagaagaactgactcccggaaccagtggggcaaccagaccaatcatcaagccagcaacccttgct

SEQ ID NO: 601 - RNA, 174 nt, synthetic construct
  source 1..174: mol_type = other RNA
gatacaatattaagtgatgattctcttaaacagtcagagttaattaacaacgatttggcgtggataattttaataatctccagtgtcctgcttttcgttataatagcttcaacccttctgtgtaaactaggaactcatcaacattgaaaattttgaaagcttcagtacttgaat

SEQ ID NO: 602 - RNA, 174 nt, synthetic construct
  source 1..174: mol_type = other RNA
cagtggcccctaacacaagaaaaactttctgccgcacaacagctggtgcaggaacagctgagacttggtcatattgaaccttctacttctgcttggaattctccaatttttgttataaaaaagaagtctggtaaatggaggttgttacaagatctccgtaaggtaaatgagacg

SEQ ID NO: 603 - RNA, 174 nt, synthetic construct
  source 1..174: mol_type = other RNA
attgtgatgtatgcagagatccaacgtttatgtacttaaggagtagattaacatgttttaactttccaaataagttaccattgtatgaaaatggagaaccaaaatttaaatttactgataattgctggacgtctttttttagcaagttttggaagcacttagatttacctgaag

SEQ ID NO: 604 - RNA, 174 nt, synthetic construct
  source 1..174: mol_type = other RNA
aagtgcgcgcggcgcgttgtcctcgcaccgggctttggatcgtccgtgatcgccgcggacgcctgcgacgttggctctcgcagcccgaggtgtgcgtgctctacgtcacgccagacttggacttttactgggtgctgccgggcggctttgccgtctcttcgcgcgtcactcttc

SEQ ID NO: 605 - RNA, 174 nt, synthetic construct
  source 1..174: mol_type = other RNA
tacaatctggccctgatataacttttcctactgcacctatgggaacaccctttagtcctgtaactcctgctttacctacaggccctgttttcattacaggttctggattttatttgcatcctgcatggtattttgcacgtaaacgccgtaaacgtattcccttatttttttcag

SEQ ID NO: 606 - RNA, 174 nt, synthetic construct
  source 1..174: mol_type = other RNA
ccgctcccagcgatcccagcgtaagcgcacggcgagatcgcgagcgagggcgaccagctcgggttcccccgagaatttcatgaccagcatgaaggggacgagctgcttgccgaaggaccccatccaggtgtaggtttctacatcgtaggtgacaaagagccgctccgtgcgagg

SEQ ID NO: 607 - RNA, 174 nt, synthetic construct
  source 1..174: mol_type = other RNA
tacaatataatgacaatgtccaggtagtcctcattcttctcatagtagttggcttaataataatttccgctagtttaatattgctttattgccaccgcaaaaaaatcaaggccaaagttcaacatcaaccagtgcatatttgtttagaaaaataaaaatttttttcttttcagt

SEQ ID NO: 608 - RNA, 174 nt, synthetic construct
  source 1..174: mol_type = other RNA
gggaagctcacgtggacgagattacatcgtccgacaaaagttccgtcggatccatattgagaatttgttgccaaaacaaatcgtccggatgtgcagacatctagaggtgacaagccaggggaattaccttattttccgtatacaactataaaaaacttgggaggcgcaaacggt

SEQ ID NO: 609 - RNA, 174 nt, synthetic construct
  source 1..174: mol_type = other RNA
caggtaacctgggggatacggacggagaggactccaagtcagaagcatcggaagtggattattgtccacccaagaaaaggcgtgtgatttcagcaactccaccaaacagtccagtaagtggtccaagcctttctacctttttagatacttggcaatcacaacctagagacgacg

SEQ ID NO: 610 - RNA, 174 nt, synthetic construct
  source 1..174: mol_type = other RNA
accagttaggagggatatgtggttctggtaggagacgagaacctaaaacagttcccgcctccgtctgaatttttgctttcggtttgggaccgaagccgcgccgcgcgtcttgtctgctgcagcatcgttctgtgttgtctctgtctgactgtgtttctgtatttgtctgagaat

SEQ ID NO: 611 - RNA, 174 nt, synthetic construct
  source 1..174: mol_type = other RNA
gtacacagaaacgcaaggattcagacgcatccgaacatgatcagaactcaaaatcaaaagcgtcagtggaaaaaaaccaacccctttaaacacgttttacaaatttttaactaataaatgctacccacatgaaatcacgtactatctttttctgtgttttatcttccatagagc

SEQ ID NO: 612 - RNA, 174 nt, synthetic construct
  source 1..174: mol_type = other RNA
acctagtgtatcctcggggctgtaatataatcagccatttaacacataacaagccctactgttttcttgttttgccgtgcatttagaataagagacaacttaaacctccgattcggcaacacagggaataatctcaccagacccggcagtgtcttcaggcttcatagccccaag

SEQ ID NO: 613 - RNA, 174 nt, synthetic construct
  source 1..174: mol_type = other RNA
ttgatggtttatatttaacgattattggaaaaattaaatgttcactagggttcttacataagatatttactatcacgtgcgcggggtcatattccgttgcaaacacagtaatagtcattgtgaatgtctttcagtttatcttccaacagcttttaatataagacaataggaatc

SEQ ID NO: 614 - RNA, 174 nt, synthetic construct
  source 1..174: mol_type = other RNA
ccctgccacagcattcacagtatatgtattttgttttttattgcccatgttactattgcatatacatgctatattgtctttacagtaattgtataggttgttttatacagtgtattgtacattgtatattttgttttataccttttatgctttttgtatttttgtaataaaagt

SEQ ID NO: 615 - RNA, 174 nt, synthetic construct
  source 1..174: mol_type = other RNA
cagatgtgcccaagcctggatgttgactccattatcccccggacaccagatgttttacacgaggatctcttaaatttctaactcccgttattgaaaccacgcctgcttcacgcctcgtttactaatggaatattaataaatatcttcctgtcggctctctttgaagtggttgcc

SEQ ID NO: 616 - RNA, 174 nt, synthetic construct
  source 1..174: mol_type = other RNA
ggcggcgagggcgcgacccacgcctcgaccggggtcctcacaaacacagaatctgtagacttggctggcctcatggtctcgtcaggccagctcacgggcttcaggcttatatgataaaatgggcgtggcagaatagtataagacgcgaggcctgggtgaggagagtccagagca

SEQ ID NO: 617 - RNA, 174 nt, synthetic construct
  source 1..174: mol_type = other RNA
cattcttaacatctggtcctgacatagtgtttccttctgttcctgcaggtacaccatatttgcctgtgtcaccttctatacctgccatatctgtactgattcgcggtactgattattatttgaatcctgcatactatttcagaaaacgccgaaagcgcatattagcatattagg

SEQ ID NO: 618 - RNA, 174 nt, synthetic construct
  source 1..174: mol_type = other RNA
taacacaaccccacgcccttctaatacataaagtgtaatcacgtgatttgttgtggtttccgcatatgtaatacccgtttaaaagcctctcttcttaatgtatcgacagactgggttttgggtggtcatttgaccctgccaacaaccccccattattacgagtacttcaccaaa

SEQ ID NO: 619 - RNA, 174 nt, synthetic construct
  source 1..174: mol_type = other RNA
gttagacctagggttagggttagggcctagggttagggttagggttaatacccccctttttttaacccccccggggagtttaaagtaatttttgaaacgcgaggaatatctgtcttccagagcaacagtatcgcacaaaaaagtgtcccggcccgagcgcagtccgacttcccg

SEQ ID NO: 620 - RNA, 174 nt, synthetic construct
  source 1..174: mol_type = other RNA
gaacctggcccctgctattgttcccggggggcttctggctaagcagtttggtgataatatgagagagtatctacaactagaacttagagaagaacttagagccaagggcatgtcaattgatgatgccattcttaatttgctacaggtgacacaggagcaagatattttgtcatt

SEQ ID NO: 621 - RNA, 174 nt, synthetic construct
  source 1..174: mol_type = other RNA
ctggcccaaacggaggatcctaggtgggtgtgcatttattagacgttggtgtgttgaaggacggatcaggcggggaggaggggtgggggagacttactgcagcactaggttaggttgaaagccggggtaaaaggcgtggctaaacaacacctatactacttgttattgtaggcc

SEQ ID NO: 622 - RNA, 174 nt, synthetic construct
  source 1..174: mol_type = other RNA
aacaaaggacgtctggccagcagcagcttctgctctacaaggaattggtaactttttatctgggactgcccaaggaatatttggaactgcctttagtctcttgggatacttaaagcctatcctaataggagtaggggtcattctcttggttattcttatatttaagattgtatc

SEQ ID NO: 623 - RNA, 174 nt, synthetic construct
  source 1..174: mol_type = other RNA
ttttttaatcctgtttttttaccattgtattggatatgtgttaagaatgagatgtcctaacggatgggcaagcagccaatgattcttaattcttaaagcgtgtgattcagtatctgtttttataatacggagagctgccgagctgagcggaacagagctttggctgtgacgagg

SEQ ID NO: 624 - RNA, 174 nt, synthetic construct
  source 1..174: mol_type = other RNA
gcaagacacctgcaaatcgcagtcgtcgccgtagacgcacaagcaaaccgactcccggcgccctggtgcggcaagtgtaccgcaatggtagtgcggaacctttgacactgccgcgtgcgcgttaccatccgagtatcatcacttaatcaatgttgccgctgcctccttgcagat

SEQ ID NO: 625 - RNA, 174 nt, synthetic construct
  source 1..174: mol_type = other RNA
gaaggttatgctgtgtcatatcctgaacgaaggaattatccagaaattatttatcctcaacccgatttgccaactgtaataattcatactgcagatacctctggggacttctatttacatccaagccttcgcaggcgaaaacgtaaacgcacttatttatgatatttctttcag

SEQ ID NO: 626 - RNA, 174 nt, synthetic construct
  source 1..174: mol_type = other RNA
cccttgttggagcggtcgcgttttctctgttcccgtcgtgccggttcctaccccccgctccctgggaccgccccctaccccccacctccccgtttgggcctcccccctcgcaccacccctttcctcgtccgtctgcggggagggcgtgtgtaaaaaatcgggcctccggccacc

SEQ ID NO: 627 - RNA, 174 nt, synthetic construct
  source 1..174: mol_type = other RNA
taaatgtactataattgttcagtctaaaaataatgttgggtatttataattaccgcccccgtgttacttggaaacacccatacatatgttccactctacatcaaacttctcgcagttttcttgttcccgcacacgtttacacgtccggattcaagtcgcaacgctgctgacaaa

SEQ ID NO: 628 - RNA, 174 nt, synthetic construct
  source 1..174: mol_type = other RNA
taccgttgatcgggaaatgctcggatggtgtggttatgcacgtaaagaacattttataatgatgtaataaaatgttggcgccaaaaaaatacagtatataatgtgttggtcatttcatttgtttttaaagcacagaaggcgcgagttggtgctaggacttcgttcttgacagag

SEQ ID NO: 629 - RNA, 174 nt, synthetic construct
  source 1..174: mol_type = other RNA
atgcaaagctacggtatttgcacagtagaatacatgtgttacagtttttaaatccatttccaattgatgtgaatggaaatcctgtataccaattaaataatgcaaactggaaatgtttttttgaaaggacatggtccagattagatttggataacgacgaagacaaggaaaacg

SEQ ID NO: 630 - RNA, 174 nt, synthetic construct
  source 1..174: mol_type = other RNA
attcggccgatgatagcagcgtgctggacttgggtgggagaggaaggggcaacccgtttgctcatttgcgccctcgcttgggtggtatgttgtaaaaaaaaataaaaaaaaaactcaccaaggccatggcgacgagcgtacgttcgttcttctttattatctgtgtctagtata

SEQ ID NO: 631 - RNA, 174 nt, synthetic construct
  source 1..174: mol_type = other RNA
gcacaatcggtatgaacatcatcctctgcacggactgtatcataatgaaaatgattatccgtaatttattaaatacattaagcaaatactgtctattaagcttcaattttataaacatgttttccagaacaaaaatgcaaacaaggaaatgataacgacgtcattcaaagcgcc

SEQ ID NO: 632 - RNA, 174 nt, synthetic construct
  source 1..174: mol_type = other RNA
aaatgaatctaaaccctctacgggaacgatatgaaaaatccgcagaaattagcgatcacattcttgccgctctacgtgatcccaacgtacacgttgtgtattaaagcattgtataaaaacacgcatgcgggcttgctgttctcatttctaggttttgtcttaaatacacccgcc

SEQ ID NO: 633 - RNA, 174 nt, synthetic construct
  source 1..174: mol_type = other RNA
cagcaaaggataatagatggccatatttagaaagtagaataacagtatttgaatttccaaatgcatttccatttgataaaaatggcaatccagtatatgaaataaatgacaaaaattggaaatgtttttttgaaaggacatggtccagattagatttgcacgaggaagaggaag

SEQ ID NO: 634 - RNA, 174 nt, synthetic construct
  source 1..174: mol_type = other RNA
acgagttcgaggggcgggtctgtatagccctgcgggccctcatctacaccttcaagacgtaccaggtatttgtgccgaagcccaccgcgctggccacatttgtccgcgaggccggcgcgctgctcagacgacactcgatctctctcctgtccctggagcacaccctctgtacct

SEQ ID NO: 635 - RNA, 174 nt, synthetic construct
  source 1..174: mol_type = other RNA
acccgacgccgaaccaccactggaacccgccgccgccgtcgccgtcgccagcccgtgctggccccgatttccgtgcgcagggtggctcgcgaaggaggcaggaccctggtgctgccaacagcgcgctaccaccccagcatcgtttaaaagccggtctttgtggttcttgcagat

SEQ ID NO: 636 - RNA, 174 nt, synthetic construct
  source 1..174: mol_type = other RNA
acctgggaccgcaatgtccagggttagtagtcagcggcatcgtcggtgtgctttgtgggttagcagttataatcatctgcatgttcatttttgcttgctgctacagaaggcttcaccgacagaaatcagacccactgctgaacctctatgtttaatttttgattttccagagcc

SEQ ID NO: 637 - RNA, 174 nt, synthetic construct
  source 1..174: mol_type = other RNA
tactaattttgaaaggcggggttctgccaggcatagtctttttttgtggcggcccttgtgtaaacctgtctttcagaccttgttggacatcccgtacaatcaagatgttcctgtatgttgtttgcagtctggcggtttgctttcgaggactattaagcctttctctgcaatcgt

SEQ ID NO: 638 - RNA, 174 nt, synthetic construct
  source 1..174: mol_type = other RNA
aggctgggcggcatgccaagatcgctgagacgtcagttccccgtgacgtgggccctggccagcctgactgacttcctgaaatctttgtaaatgaataaacagtgggtgttgcgtgatgagtaaagtgtaacatttaatgtgggactgggaggccggggcgataccttgggcatc

SEQ ID NO: 639 - RNA, 174 nt, synthetic construct
  source 1..174: mol_type = other RNA
agtgtgtccccctccattccacccactgataatacgcccgacaataaagttgatgatattgaattccacacctgcttgtgtttgtgattttatttcatattccatgagagagacctcgcatatttgcagaagggtcactgaaacatcttatcttaaaacagttacacctgaata

SEQ ID NO: 640 - RNA, 174 nt, synthetic construct
  source 1..174: mol_type = other RNA
attctaggtggccttatttacataatagattggtggtgtttacatttcctaatgagtttccatttgacgaaaacggaaatccagtgtatgagcttaatgataagaactggaaatcctttttctcaaggacgtggtccagattaagtttgcacgaggacgaggacaaggaaaacg

SEQ ID NO: 641 - RNA, 174 nt, synthetic construct
  source 1..174: mol_type = other RNA
tatttaatgtaaatgatacttatgatttcatctattttctagttttaggttttctgccaataccggccattatataaggcgggatgttgttgtgttgattacgtcaatacggatggggttttgaatataaagacttacagagcttttaatgaatcattgcttcgtttcttcggg

SEQ ID NO: 642 - RNA, 174 nt, synthetic construct
  source 1..174: mol_type = other RNA
gttactagtaagaagttattagttggtgtttcaacgagttttagacgtgtattaggagcggttgctttacacacagttagtgcggtctgcactgcctccgagaaaattttagcatccttttcatttaatttagtcgtttctttataaattgcagctagagcaatatctgtgtcc

SEQ ID NO: 643 - RNA, 174 nt, synthetic construct
  source 1..174: mol_type = other RNA
agaccggggaccggtcactaccaaggacgcagacctctttttgagtatcacgcctccggaagtagttgggcaagcccacctatatgtgttgggatggttggggttagccatccataccgtactgcctgatagggtccttgcgaggggatctgggagtctcgtagaccgtagcac

SEQ ID NO: 644 - RNA, 174 nt, synthetic construct
  source 1..174: mol_type = other RNA
ccgtgtttttcacctaaagttccgcgtacggtgtcaaagtccggtgtttttacgtaggtgtcagctgatcgtcagggtatttaaacctgcgctctgcagtcaagaggccactcttgagtgccagcgagaagagttttctcctccgcgccgcgagtcagatctacactttgaaat

SEQ ID NO: 645 - RNA, 174 nt, synthetic construct
  source 1..174: mol_type = other RNA
ttatgccgagtcatatgcggaagtgatttttttcgcgggcttttggggttttttttgtgttgtgtaggcgaactttggccatttacgtcactatttttcagtattaaaggtgcgcacttgcggcagattgtgtctgctgtgcctggctttgtactgtttttctggtaaggcatt

SEQ ID NO: 646 - RNA, 174 nt, synthetic construct
  source 1..174: mol_type = other RNA
cgtaggggtttcctgatattttcttgatgccttttttgaattgaggctatagctcgtccgaatcccgatgaccaggtgacggtcggagatctcgctgaagccgtcttgtatgtgactatttccatctgtttttagtggcgcttcgagttcgttttttctgaagtggatctgccg

SEQ ID NO: 647 - RNA, 174 nt, synthetic construct
  source 1..174: mol_type = other RNA
cttgtcctggccttctggtccaggagagggtaaatagacctgcacagttaaggcctaaatggaaaaagcctactcctattttgaaggtattaaatcctaaaactgtggtaatagctggcccaggcggccaggaaagaattgtgtctatagataatctgaagaagacacctcatc

SEQ ID NO: 648 - RNA, 174 nt, synthetic construct
  source 1..174: mol_type = other RNA
ccatcaagcaagtgttgtagaataccaggggtttcacaggctgctaaacttactaaattttacataggattatataattcttttcgatacacgttatatctttagcaaagtgaggaaaacagctttatcatgttagatgccagttatccattttaagtgaatcctttcctcaac

SEQ ID NO: 649 - RNA, 174 nt, synthetic construct
  source 1..174: mol_type = other RNA
gacgtcacggtaagttgaagaaccttttaacgccaatcaaaatatttttataggctcctcctacctaacattatataaacggtactacgactgtataatgtgtacacataccccaggcaacatttcagatagtaccacgtcacgattgcattgtgtgaatttaacccctcagct

SEQ ID NO: 650 - RNA, 174 nt, synthetic construct
  source 1..174: mol_type = other RNA
gaattgctgggatcgttgcggttgtcgcctttggtggtccgcaaccgcagccagaccgcagtggtggccacggtggtgtctcagacgtcgtgcgtcaaacatgacgtgctgaacttttccttggtataaaattcactcagtggcggcgtagccattgtcttccgttcatccacc

SEQ ID NO: 651 - RNA, 174 nt, synthetic construct
  source 1..174: mol_type = other RNA
agctccggtgccagtaattcacaaggagtgaaaacccttgccgctatacgtaaattctgcctgccggacaaaaactgtttcagaaatttcctttctttttctacaacattatttaaggttccctcatcgatagatatatattttctcttcttcacagcttccacagtatccaca

SEQ ID NO: 652 - RNA, 174 nt, synthetic construct
  source 1..174: mol_type = other RNA
cccctgtcaacagcattggaatttaacttactgtcccccaccagtgtcgccctttgtgatcaatactgaatatttagactataatcccttgcttgcttacggcggtctcgcagctcttattttattcctgatttctaacttgtttctagtgcaacatttgtattcatactaaca

SEQ ID NO: 653 - RNA, 174 nt, synthetic construct
  source 1..174: mol_type = other RNA
ctactgcagaggaggagttttgtccgtaccggatagactccaagtgtcacaattgtggctgtcgcataagggtgacagtcgctgcaactgaatttggaatacgttgttttgagcaactgttactgaaagagctttgtttattttgtcctgcgtgctccagacaacttccccgca

SEQ ID NO: 654 - RNA, 174 nt, synthetic construct
  source 1..174: mol_type = other RNA
acagtgtgcaatcggttcaccgtaaattatcattgatatctgttatatcctaataagcattcaaaatccaatcctcccctgaataacagcccaatccgcaaagtactttgggtataggtataatccaagttgaattctcaagtagacaactaggcctttgagtatcctgtgatc

SEQ ID NO: 655 - RNA, 174 nt, synthetic construct
  source 1..174: mol_type = other RNA
ggaggattacaagtgggaatttgaagagcttttgaaatcctgtggtgagctgtttgattctttgaatctgggtcaccaggcgcttttccaagagaaggtcatcaagactttggatttttccacaccggggcgcgctgcggctgctgttgcttttttgagttttataaaggataa

SEQ ID NO: 656 - RNA, 174 nt, synthetic construct
  source 1..174: mol_type = other RNA
tgctatctatgtggtacatatgtatcgtaatcgagataaataaagtttttaaagttgcaaaagccgtttttattattcccaatgtcgaaaaaaacgtttccatcatttaaattccgcggtgggtgttttaatcttttatttaaggggagcgtggatgtgtcaataaaaaccagg

SEQ ID NO: 657 - RNA, 148 nt, synthetic construct
  source 1..148: mol_type = other RNA
gaattcgtcgattcggttgcagcatttaaagcggttgacaactttaaaagaaggaaaaagaaggttgaagaaaagggtgtagtaagtaagtataagtacagaccggagaagtacgccggtcctgattcgtttaatttgaaagaagaaa

SEQ ID NO: 658 - RNA, 174 nt, synthetic construct
  source 1..174: mol_type = other RNA
gtaagcgactcccttccgtggtttggtggaaaagtcacaagggtaccatagcgaggaaccccggttcgaaaccggcaggatccgctatgagcacaagtgaggcgcttgcgcgttgaacccggccaaggacccccagacacggagaggagtctttttttatttattttttcttag

SEQ ID NO: 659 - RNA, 174 nt, synthetic construct
  source 1..174: mol_type = other RNA
aagggatcagacgtgtattttattagattaacggagtgcatgactatcgcgaaaaggcccagaaaaaggccgagtcgcgagatgtgaagcatgtcgggtgagttgaccacaatgaatttgtacaagtagaatgtgtgactaaaatagtatttgctttttttataggattggacg

SEQ ID NO: 660 - RNA, 174 nt, synthetic construct
  source 1..174: mol_type = other RNA
tatgagtgtgttcagtccaataatattaaaggactgtacatttatgcaaacaacagttaccataactcaaatcttgccaggttctaaggaagcaataattttcccagtttacgatataggcaaattattatcagctcttgttttttcagagaacggtgtacttttgaaactata

SEQ ID NO: 661 - RNA, 174 nt, synthetic construct
  source 1..174: mol_type = other RNA
ctaactttttaacgaggtgtaagcatcaggttaatctaagacagtcacctattttcctgaccctcctgaggcacatccgccgacgtctgggcctgggccgtgcttccgtaaaacgagagattacccttctcctggcccacctgcgcaaaaagacagcccccatccactgccgtg

SEQ ID NO: 662 - RNA, 174 nt, synthetic construct
  source 1..174: mol_type = other RNA
agactgggaggagttgggggaggagattaggttaaaggtctttgtactaggaggctgtaggcataaattggtctgttcaccagcaccatgcaactttttcccctctgcctaatcatctcatgttcatgtcctactgttcaagcctccaagctgtgccttgggtggctttggggc

SEQ ID NO: 663 - RNA, 174 nt, synthetic construct
  source 1..174: mol_type = other RNA
ccagccgcgggctccgcgtcctcgtcgatcaccagcggtcgcgtcggcaccggagaatccacgtcatcctgcacgtcgttttcctcctctccgtcgtcatcgtccagaaacggcacccgctgcttagcccaggacattctttttccgcgtcctcaatcagcggcgccgatcgcc

SEQ ID NO: 664 - RNA, 174 nt, synthetic construct
  source 1..174: mol_type = other RNA
agctagcgaacttcaattacctaaactagaatcctgctgtgatgaatacttgcgatttacagacggtgatgtgatagaactgacatgtgacgacggaaacatgtgagtttttactgtatgggacaatacttttcgtcttagaaacaaactcatttcttaatttctcgttcgcag

SEQ ID NO: 665 - RNA, 174 nt, synthetic construct
  source 1..174: mol_type = other RNA
agcaaaagcaggtactgatccaaaatggaagactttgtgcgacaatgcttcaatccaatgattgtcgagcttgcggaaaaggcaatgaaagaatatggggaagatccgaaaatcgaaacgaacaaatttgccgcaatatgcacgcacttagaagtctgtttcatgtattcagat

SEQ ID NO: 666 - RNA, 174 nt, synthetic construct
  source 1..174: mol_type = other RNA
gatgactcagctgacgacagtagtgtattagatttaggagggtcaggaaacccatttgctcatttgcgcccacagggttgcatagggtcattgtattaaattgaataaaagcatacttaccaaagccatggcgaccagtgttcgtcttattttccttcttccgttagctgtgaa

SEQ ID NO: 667 - RNA, 174 nt, synthetic construct
  source 1..174: mol_type = other RNA
cacttatcataagaggtggaattctttaaggataatcaatatacaaaattccacgacaattggcgcccaacgtggggctcgaatataagtcgggtcttattaaaaaagacttatttaggtcttacaattatccctagggaccttcacgcactgcggaaggaataagcactcaaa

SEQ ID NO: 668 - RNA, 174 nt, synthetic construct
  source 1..174: mol_type = other RNA
ataatatcctgatgaattctatagaacttaggattaagaaaaaattcatgatgaagattaaaaccttcatcatcctttaaaaagagagctattctttatctgaatgtccttattaatgtctaagagctattattttgtaccctcttagcctagacactgcccagcatataagcc

SEQ ID NO: 669 - RNA, 174 nt, synthetic construct
  source 1..174: mol_type = other RNA
tgtagcatcacctgagctgcttcctgatagcgaactgacagagcttatatgcaatgatttggatgactttgtacaactaatgctacgcatggagattcgggatcggggttttgagcctaatgttaatcttttaaatgaactgcaggtgacacgggaacctgatctttttcaacc

SEQ ID NO: 670 - RNA, 174 nt, synthetic construct
  source 1..174: mol_type = other RNA
tattgtatggatatctgagtttattgtgtacacatctgtgctagtactaacactgcttttatatttactattgtggctgctattaacaacccccttgcaatttttcctactaactctacttgtgtgttactgtcccgcattgtatatacactactatattgttaccacacagca

SEQ ID NO: 671 - RNA, 174 nt, synthetic construct
  source 1..174: mol_type = other RNA
ccaaccgtgggtcgtgtggacgccgcatatttagagagtaaatcccgcacccccctggcaaactccggtcctctagtgagggatacccggtgagttggtggaggtaaaagacccaacacttgcctacccaggcgagccgcattttcagcctgcaccttcatatccacgccggca

SEQ ID NO: 672 - RNA, 174 nt, synthetic construct
  source 1..174: mol_type = other RNA
ggtgatcataaacacgcccaggaagtgacgtatgacagccaatcagcattgagcatatagcctatataaaccgatgcacttccgcatctcgtcagactgcatccggtctccggcgagtgaacatctctggaaagagctccacgcttgtggtgagtgacactatggccttttctg

SEQ ID NO: 673 - RNA, 174 nt, synthetic construct
  source 1..174: mol_type = other RNA
atggaatggccccgacccagtgttaatatggggcagaggttcagtctgtgtatactctcaagcccatgatgcagccagatggttaccagaacggctagtaaggcaaataaacaatgaaaatcagtccagggagtcatattctccctgagatcatctctcctcttacctacagaa

SEQ ID NO: 674 - RNA, 174 nt, synthetic construct
  source 1..174: mol_type = other RNA
gtttttcaagaacgtggtatcttttacatgtttgagacctacataaaagtgactcagagttcggatacggcgttgcctgatttggagcgaccccgacccgcgaccccgcccttcagtgagacttcgtaactcccgctcgggcaccaccggctagtgtatgccgcgttagcagcc

SEQ ID NO: 675 - RNA, 174 nt, synthetic construct
  source 1..174: mol_type = other RNA
atgttttataagtacaaccattttttcccagagacctatgaagattgttggaaagggatttattatttgtttgttctgtttattttggcttgcattgcatatcatgattatataagtccttcaatagcagagaatatgttatcatttatcaggtgctctaaatatccctagaag

SEQ ID NO: 676 - RNA, 174 nt, synthetic construct
  source 1..174: mol_type = other RNA
ataaataacataaccaatagaaacttaatacagagtcacgccccattacaacaaggataaaacacgggatcattttcttaacattgtagtagcgctgaaaagcgtcccctcccccggctcacagagctgctcttcggtgtagttgggtatactggtgcgcctcatttaatcgcg

SEQ ID NO: 677 - RNA, 174 nt, synthetic construct
  source 1..174: mol_type = other RNA
ttgagctgtccgaggagcaccctcagggcccggcccacggagtgcggatcgtcgtcgaagggggcctagactcccacctgcttcgtatcttcagccagcgcccgatcctggtccagcgccaacagggcaacaccctcctgaccctttactgcatctgcaaccaccccggcctgc

SEQ ID NO: 678 - RNA, 174 nt, synthetic construct
  source 1..174: mol_type = other RNA
tcggcagaggatcattgtgttctgatcccaccgccgcgtctagagaggcgcgctctgccatctgactctttctcttgcctctacgctactcgatctcgccgccgtttctggtttctttttgttttgtttctgataagcctctgtgtcggagtttctctcttcgaaatcttcgaa

SEQ ID NO: 679 - RNA, 174 nt, synthetic construct
  source 1..174: mol_type = other RNA
ttccgattacgattttacgatttcattaaatgtaatttgtgtaattcatctttaaagagaaagagaaatcctctgacaataaaaaattgaacagtgaagcttgcttaaaactttgaaaattttttgtgattttaaataaaatttaaaatcaatttatcctaagcttttcaggct

SEQ ID NO: 680 - RNA, 174 nt, synthetic construct
  source 1..174: mol_type = other RNA
acatgcctgcaatatgcatgtgtaaagccaagttctggagttaatataataaatcgtttttggcaaaatatcgcgctgtttggaaaagttgaagaaatctttacgtcctgttcatgtttccaaattatagactgatacgctttctgaattgcatctatatcgcatgatcgcaac

SEQ ID NO: 681 - RNA, 174 nt, synthetic construct
  source 1..174: mol_type = other RNA
gtatcctgcccctccttattccactgatcgccgcggcgattggcgccgtgcccggaattgcatccgtggccttgcaggcgcagagacactgattaaaaacaagttgcatgtggaaaaatcaaaataaaaagtctggagtctcacgctcgcttggtcctgtaactattttgtaga

SEQ ID NO: 682 - RNA, 174 nt, synthetic construct
  source 1..174: mol_type = other RNA
atgaagctagcttaatgtatttaaagagtagactagtattttttaagtttcctaacaaattacctttaaaagaaaatgatgaagtactttatgaaattactgatgcatcatggaaatgtttttttatcaaatttgcaagccatttagagctgacagccagaggagacgagcagc

SEQ ID NO: 683 - RNA, 174 nt, synthetic construct
  source 1..174: mol_type = other RNA
cattgtgatcggggtggtcatcctagcgatgctgctctacttcatcttctgccgccgcatccccaacgcgaaaccggtctacaagcccatcgttatcgggcagccggagccgcttcaggtggagggaggtctaaggaatcttctcttctcttttacagtatggtgatttgaact

SEQ ID NO: 684 - RNA, 174 nt, synthetic construct
  source 1..174: mol_type = other RNA
caaaattttactttgattgattttgcaaggagttataaaaatcttgaaggataaattgttataaagtagagtcgaagaacattaaatgttctttgttagaattattcatctaagttgtttttgagtatattcgcttcaatacaactcctctttatatttgatttaagttttaaa

SEQ ID NO: 685 - RNA, 174 nt, synthetic construct
  source 1..174: mol_type = other RNA
gcgacagcgcaataaggtctctgttgaaattttctcccagcagcacctcacttccctcttcccaactctggtattctaaaccccgttcagcggcatactttctccatactttaaaggggatgtcaaattttagctcctctcctgtacccacaatcttcatgtctttcttcccag

SEQ ID NO: 686 - RNA, 174 nt, synthetic construct
  source 1..174: mol_type = other RNA
ttttcgttgctaagtttgtgactctctccctttattgccttgtttgctggtgggttttgaaattgacatggtaattaataaacagcgttcgtgctttagagtatgagtttgattgtatttgtctctgtgcatttcacttgtttttttttctctgatcatttgcatgttgctagt

SEQ ID NO: 687 - RNA, 174 nt, synthetic construct
  source 1..174: mol_type = other RNA
aataaattacgaaaacgtgcatgcgttttttatttttacaatgcgccgtatatggtatgtctgtcatgtgctctaaagtcccatatataaaagaagccccaacgagtgtatgcgtattgcgtaccgcgaccctgggatgttttacaggcgcgtttgtttgtctcggttataagt

SEQ ID NO: 688 - RNA, 174 nt, synthetic construct
  source 1..174: mol_type = other RNA
gtcctaaaagttcgcaaggagtaaaacttcgcgaaagcacacactctttgggaacaccaaaagctagcaaacttctgatcttttttttctcattttcaatgagattatttaaggaagtttcatcaattgtctgatgtttccttttttgaagcatttccattgttcgcaagcgaa

SEQ ID NO: 689 - RNA, 174 nt, synthetic construct
  source 1..174: mol_type = other RNA
agacaatcactattagctgctaaggtttgaatgctgcttgttttgcccgcacccgcagtaccggttattaataatactctaaaaggtaaaaatggcaacggttgagcaaattcttcatcacctatagaatgaatttcttcaaaattgctattaaattctaattcaggatcaaga

SEQ ID NO: 690 - RNA, 174 nt, synthetic construct
  source 1..174: mol_type = other RNA
gctggtacaagagtgcacgaaagtggatgtggattatagatgactgaattgtgttgccgcgtcttaaatgggtttgttcttttataaagtttcaaatttgtttctattgtattccacagagatgcggcagattttttggaagaaattgcaaacgatctgtgaattctaaatatc

SEQ ID NO: 691 - RNA, 174 nt, synthetic construct
  source 1..174: mol_type = other RNA
tcaggtgacatatctactacattatcagattataatattttagatgcatccttgatagtaaaatcaaatgtttctgaacagcccctttttgttttagattattcagattatgatttacatccaggtcttcttccaaaaagaagacgcatagattatttttaatttattttacag

SEQ ID NO: 692 - RNA, 174 nt, synthetic construct
  source 1..174: mol_type = other RNA
ggtttgtgtgggtattctgggtatttcctgttttgtaggactgaaggagataatatactttatatttgttagtgttaattccatgtggcctttttgtaataagttattgactacggcggttaactgtttcttcaagggccgtacctttcttcgacgtgaattaaagatttaaaa

SEQ ID NO: 693 - RNA, 174 nt, synthetic construct
  source 1..174: mol_type = other RNA
atactgggcctgatattgtactacctacttcagcacagtggccatatgtgcccctgtcacctgctgacaccacccattatgtgtacatagatggcggggatttctatctttggcctgttacctttcacttctcccgacatcgtcgccgtaaacgtgtctcatatttttttgcag

SEQ ID NO: 694 - RNA, 174 nt, synthetic construct
  source 1..174: mol_type = other RNA
ctcggttgtaacgcgcttaggaagtcccctcgaggtatggcagatatgctcttgcatagggggaaaaaatgtagtcttaatattgtctgtgtgctgcaggagctaagctgactctgctggtggcctcgcgtaccactgtggccaggcggtagctgggacgtgcagccgaccacc

SEQ ID NO: 695 - RNA, 174 nt, synthetic construct
  source 1..174: mol_type = other RNA
ggaaatatgtatataacattaaagatataactttttattaaaaaaaggggaacacaagtcccgacacgtaccgtggcaccttggaggaagggccctcgtcaggattatcagggtccatctttctcttggcagaggactccatcgtgtcaaggacggtgactgcagaaaggatcc

SEQ ID NO: 696 - RNA, 174 nt, synthetic construct
  source 1..174: mol_type = other RNA
gcgtgctcgtgaaaacgctgtcctccgcctcctcatccgccggcgtgtcctcgttgctcgaggggatataaatcaccgtcgagggttcgccagagcgacgtgacgagctgcgacgccgcgacgacatcctctcgtctgctgaggtgcgttcggctcagttgcttacctgcatac

SEQ ID NO: 697 - RNA, 174 nt, synthetic construct
  source 1..174: mol_type = other RNA
ggttcgacggcccatgacgatttagaatacaccgagccattcctttatttccccccatccccggtcgcttatgcgtgtcaaacactaccaataaagataatctgccaatcgcaccttatatataatatgtggtcgcgtgtggtctttttaaggagctctgaaacacagacaggt

SEQ ID NO: 698 - RNA, 174 nt, synthetic construct
  source 1..174: mol_type = other RNA
atgaatggctaattgacaccttagcagaagttcaagaagaagctttaaagcattttgatagacgcttattgcatgcagtaggaagctggatctacaaaacctatggggatacattagaaggggtgcgacagcttatctcaattcttcaaaaagctctgtctatgcactatagat

SEQ ID NO: 699 - RNA, 174 nt, synthetic construct
  source 1..174: mol_type = other RNA
gtggatgtgacggaggacctgcgacccgatcatttggtgttgtcctgcaccgggacggagttcggctccagtggggaagaatctgactagagtgagtagtgttttggggagggagaggacctgcataaggggcagaatgattaaaatctgtgcttttctgtgtgttgcagcagc

SEQ ID NO: 700 - RNA, 174 nt, synthetic construct
  source 1..174: mol_type = other RNA
gagggttttgctggctccattgtatattaagatgcaaattgagacaccgcctactgtgctgatagccaatgaaaaaatatctcccgtcagcacatataatactatataaggacattaccaccacctctttctttgcagagattctctgcttgcacatctgtaacactgaccata

SEQ ID NO: 701 - RNA, 174 nt, synthetic construct
  source 1..174: mol_type = other RNA
ttaaaatcagtcagcaaatctttgtccagcttattcagcatcacctcctttccttcctcccaactctggtatctcagccgccttttagctgcaaactttctccaaagtttaaatgggatgtcaaattcctcatgttcttgtccctccgcacccactatcttcatattgttgcag

SEQ ID NO: 702 - RNA, 174 nt, synthetic construct
  source 1..174: mol_type = other RNA
gcgtgttaaatgtggttcatccttcttctgagtggactattttgattcctaatgttccagatgaaattattcagcctgctatggcagtagatgtttatgatgacttttatttacatcctcatcttcttaggcgacgcaaacgaaaacggttggattttttttaatgttttacag

SEQ ID NO: 703 - RNA, 174 nt, synthetic construct
  source 1..174: mol_type = other RNA
aaataggttaagtgtctgtatccaacattaataaaatgtagtcgggcatctaatgaaggcagcattatatcgtacagttttggtaacatagggagaaaagctatttcaatttcaactcgggaagataattgttcataaagaatttctatatctgttttggcattgtcgttagac

SEQ ID NO: 704 - RNA, 174 nt, synthetic construct
  source 1..174: mol_type = other RNA
cccttagaggaggggtatgtggttctggtaggagacagagggctaaaacggtttccgcccccgtctgagtttttgctttcggtttggaaccgaagccgcgccgcgcgtcttgtctgctgcagcatcgttctgtgttgtctctgtttgactgtttttctgtatttgtctgaaaac

SEQ ID NO: 705 - RNA, 174 nt, synthetic construct
  source 1..174: mol_type = other RNA
aaagcttaccttaaatttgatatcagttgtttgtcaagtttttccagcagcaccacctgcccttcctcccaactttcgtacgggatgtgccaacgggcggcaaactttctccacgtcctaaagggtatatcggtgttcacctttttaccctgacccacaatcttcatcttgcag

SEQ ID NO: 706 - RNA, 174 nt, synthetic construct
  source 1..174: mol_type = other RNA
gttattttagataacagtatatgagtggcatgggtctagacaacttgatcattatattaagaaaaacttaggatccaagaccataaatctaggatcctttacaatctcagaccctggtgcaaggttatatatagagcccaattctcctaattaaacagtgtctcaggttgacaa

SEQ ID NO: 707 - RNA, 174 nt, synthetic construct
  source 1..174: mol_type = other RNA
tcagtgaaaacgtgcctgctctcacagatcacgggacgctaccgctgcgcagcagtatccgcggagtccagcgagtgaccgtcactgacgcccgtcgccgcacctgtccctacgtctacaaggccctgggcatagtcgcgccgcgcgtgctttccagtcgcaccttctaaaaaa

SEQ ID NO: 708 - RNA, 174 nt, synthetic construct
  source 1..174: mol_type = other RNA
cctctcctgaagttcttaacttatttacattgattcaacaggttctccattgccgccaacacccctgtttctttggacatattcgtgcacactccacccttcctggtgccctcgtacaaggcaatcacactgcggacgttcttactaaacaagtgtttttccaatcagctattg

SEQ ID NO: 709 - RNA, 174 nt, synthetic construct
  source 1..174: mol_type = other RNA
tggggctttgccctcattgtattaatgtgggagcttggtataatggatggaaatttagagagtttactccagacttagtgcgctgcagttgtcatgtaggagcctctaacccattttctgtgttaacttgtaaaaaatgtgcttacctgtctggattacaaagttttgtagatt

SEQ ID NO: 710 - RNA, 174 nt, synthetic construct
  source 1..174: mol_type = other RNA
cattggactgtagcagatgaagagcttttaaaaaatataaaaaatgaaactgggtttcaagcacaagtagtaaaagactactttactttaaaaggtgcagctgcccctgtggcccattttcaaggaagtttgccggaagttcccgcttacaacgcctcagaaaaatacccaagc

SEQ ID NO: 711 - RNA, 174 nt, synthetic construct
  source 1..174: mol_type = other RNA
aaaaatcacttacttgaaatctgaaagtatgtctctggtgtagttgttcagcagcacctcgttaccctcctcccagctctggtattccagtccccggcgggcggcgaacttcctccacaccttgaaagggatgtcaaattcctggtccacaattttcattgtcttccctctcag

SEQ ID NO: 712 - RNA, 174 nt, synthetic construct
  source 1..174: mol_type = other RNA
gatcccatggatgagcccaccctgctttatcttcttttcgaagtcttcgacgtggtcagagtgcaccagccacaccgcggcgtcatcgaggccgtctacctgcgcacaccgttctcggccggcaacgccaccacataagaagcctcttgcttcttgcaagcagcagctgcagcc

SEQ ID NO: 713 - RNA, 174 nt, synthetic construct
  source 1..174: mol_type = other RNA
ctacaaatattaatgtaggccctgacctttcacctcctgagtctccgccctttattagtacacgtcctgtatcaccttcttttgactctgttatggtattaggatgggattttatattgcatcccagttatatgtggcgtaagcgccgtaaacctgtaccatatttttttgcag

SEQ ID NO: 714 - RNA, 174 nt, synthetic construct
  source 1..174: mol_type = other RNA
ggtggctttttgccagctcttatacccatcatcgccgcagcgatcggggcgataccaggcatagcttcagtggcggttcaggcctcgcagcgccactaacattggaaaaaacttataaataaaaaatagaatggactctgacgctcctggtcctgtgactatgtttttgtagag

SEQ ID NO: 715 - RNA, 174 nt, synthetic construct
  source 1..174: mol_type = other RNA
ctgcaagtcgcactcgccgtcgccgccgccgcaacactgccagcaaattgactcccgccgccctggtgcggagagtgtaccgcgatggtcgcgctgaacctctgacgctgccgcgcgcgcgctaccatccaagcatcaccacttaatgactgttgacgctgcctccttgcagat

SEQ ID NO: 716 - RNA, 174 nt, synthetic construct
  source 1..174: mol_type = other RNA
gaggagttcaggtagatattgaaagatgagccttctaaccgaggtcgaaacgtatgttctctctatcgttccatcaggccccctcaaagccgagatcgcgcagagacttgaagatgtctttgctgggaaaaacacagatcttgaggctctcatggaatggctaaagacaagacc

SEQ ID NO: 717 - RNA, 174 nt, synthetic construct
  source 1..174: mol_type = other RNA
agaagccgccccattcctagaggtgccgatgaattctgggaaggaacatacattctcgtagttgcattcgtgctcgcatttctcgtttactccgattttcttagtaatttaagtccgtttggagaaattttatcttcgccttgtatttcaacgtgaatcttcgtcgtgaagagg

SEQ ID NO: 718 - RNA, 174 nt, synthetic construct
  source 1..174: mol_type = other RNA
gtgctggtgaagctgggcgattgtctactgacttttttgcgtgtgggatttgccagactttttgcggactgcggttatgagaagattggaaaaatatccatgcgcttcggacggatgtcgacgttgggcatgtcggagacttatcaatcgtgcatgagcctcagtaagtagttc

SEQ ID NO: 719 - RNA, 174 nt, synthetic construct
  source 1..174: mol_type = other RNA
atgcggtttttacgaactcaactttcaataagattcctttgacgacgataagtcggctttttgttcagttgattataggaggacacgctaaaggaacgatttatgacagcaatgtaattcgcgtcagtcgtcggaaacgagaagacagtttactaaaaaagatgagattggagt

SEQ ID NO: 720 - RNA, 245 nt, synthetic construct
  source 1..245: mol_type = other RNA
tccagtataaatagtagctaggcgggataatgagtcgctgtttgcacattatcaaagctacgcattagataactgcagaaagacgctgcgtatagttatgtattcttagaatacgtctgtatatacgcacgaacatataagtctgtaagaatgtaatgcttcgtacagatcactgtttattgaagttcaacggtatgaaatttgagtatacctagaattagcaggaataattggcatctcaattt

SEQ ID NO: 721 - RNA, 174 nt, synthetic construct
  source 1..174: mol_type = other RNA
ggctcgctccctgtagccggagggttattttccaagggttgagtcgcaggacccccggttcgagtctcgggccggccggactgcggcgaacgggggtttgcctccccgtcatgcaagaccccgcttgcaaattcctccggaaacagggacgagccccttttttgcttttcccag

SEQ ID NO: 722 - RNA, 174 nt, synthetic construct
  source 1..174: mol_type = other RNA
tgaatcatgtaaatatggacaatcaaggccatacagcggccgaaagacattggggtccaatctcagccgatccaaaacctatggtcatgtggaaagaccttctcacagggtcctggaaaggacccgatgtcctaataacagccggacgaggctatgcttgtgtttttccacagg

SEQ ID NO: 723 - RNA, 174 nt, synthetic construct
  source 1..174: mol_type = other RNA
caacccaatcgaaggtctcccgccccggaatcccccattgccattttacccaagtagccttattcatagatgtaaacgtttgggtgtgtgttttgttgtgcagggttcgtccgattcataacgcgacagcgtcgagtcggttttaagggaaaaggttactacggccccaaggac

SEQ ID NO: 724 - RNA, 174 nt, synthetic construct
  source 1..174: mol_type = other RNA
tcggtctcctcctggcctgcgtcttgctcgtgctcctgttcatcctgtgggggttctagacgagccggctcttcgaagcccaggtcctgctcgattttgggttgctcgtgggtggttaagtcctcctcctgctcctgcttacgcggctgctcctccatcttcccctaggaaaca

SEQ ID NO: 725 - RNA, 174 nt, synthetic construct
  source 1..174: mol_type = other RNA
agcctgacaacgaaaggatctcttacaaagttatagctccgtgcggttgcaggaactgtgaggtcaagcttcgcatttttgtccacgccacagaatttggtattagagctttccaacagctactgaccggagatctgcagctcctgtgccctgactgtcgcggaaactgcaaac

SEQ ID NO: 726 - RNA, 174 nt, synthetic construct
  source 1..174: mol_type = other RNA
gggctgatacagggaagaatttgaaaagttattggacgatagtccgggactttttgaagctcttaacttgggtcatcaggctcattttaaggagaaggttttatcagttttagatttttctactcctggtagaactgctgctgctgtagcttttcttacttttatattggataa

SEQ ID NO: 727 - RNA, 174 nt, synthetic construct
  source 1..174: mol_type = other RNA
tttgaagaaaatgcagcttgtggggtggatttaccccttagaaggccttctttaggtgcttgtggtggaattttacaaagtataaccgggatgttttcccatgggtaagaaaacagcttttaaagcagtaccggtttatattcacgccagttgactttgtttgctgcagacacc

SEQ ID NO: 728 - RNA, 174 nt, synthetic construct
  source 1..174: mol_type = other RNA
ttggcaaatttgcttctcactttacattacgtagtcacgatatttcccatagtaataattttggtgttgtaactagttttactacttatggtaatactgtttctgaggctgtgtctagattagttgaatcagcttctgaatttattgtttggcgtgcagaggcacttaataagt

SEQ ID NO: 729 - RNA, 174 nt, synthetic construct
  source 1..174: mol_type = other RNA
agaagactatagagaggaatttgaaaacatattggccgactgtccagggcttttggcttcactagacctttgttaccacttggtgtttcaggaaaaagtggtcagatccttagatttttcatctgtgggacgaacggttgcttctattgcttttttggcaaccatattggataa

SEQ ID NO: 730 - RNA, 174 nt, synthetic construct
  source 1..174: mol_type = other RNA
agagtttacccctgctcttgttcccggggggcttctggctaagcagtttggtgataatatgagagagtttttacaactagaacttaaagaagaacttagagccaagggcatgtcaattgatgttgccattctcaattcgctacaggtgacacaggagcaagatattttgtcatt

SEQ ID NO: 731 - RNA, 174 nt, synthetic construct
  source 1..174: mol_type = other RNA
ttttcctaggatttggctccatggcttagggcaacatatctatgaaacttatggggatacttgggcaggagtggaagccataataagaattctgcaacaactgctgtttatccattttcagaattgggtgtcgacatagcagaataggcgttactcgacagaggagagcaagaa

SEQ ID NO: 732 - RNA, 174 nt, synthetic construct
  source 1..174: mol_type = other RNA
tgcgtcgacctccttatcttctagggtagaggtggtggcaggactgggcggtggaatgcttaagctctgctccttttcctcgtcgctgaggacgagatgtgatggcactcgtggcgatgttgacagcaatggctgagtttccatgtctgttgtttctctgcctaggagaacaca

SEQ ID NO: 733 - RNA, 174 nt, synthetic construct
  source 1..174: mol_type = other RNA
gccaggaacagccccctctgggctgtcaggagtgggtggctaggtgggaggtcgcagtcgaccccgatggtgttcagtagatgcaccacatcccccacttcgggatagtgtttcaggtaaagctcatggaggaaagattttaatggtcgggcatttcctctgttactactagcc

SEQ ID NO: 734 - RNA, 174 nt, synthetic construct
  source 1..174: mol_type = other RNA
ccagcagcgcgcacgacgcgatcacggtaacccccatgactagacccacgcagatagccagccccgctagcgtatccagcgccatcccgttcgctcccgtcgtcgtctcctgaacaaagcaacaactccgcagtccccgttttcaaccgtttttgtttccttctccgcgagcaa

SEQ ID NO: 735 - RNA, 174 nt, synthetic construct
  source 1..174: mol_type = other RNA
taaattttttaactttagacacagaaggcaattcagcagcccagcgtttttggggagaacgatcctcatgcaaaaaaccacttgtgcgatggaaggatccacttaccaatctgtggtatgggccagaccctgtattaatatggggacgagggcatgtttgtgtttttccacagg

SEQ ID NO: 736 - RNA, 174 nt, synthetic construct
  source 1..174: mol_type = other RNA
agcaaaagcaggggataattctattaaccatgaagactatcattgctttgagctacattctatgtctggttttcgctcaaaaacttcccggaaatgacaacagcacggcaacgctgtgccttgggcaccatgcagtaccaaacggaacgatagtgaaaacaatcacgaatgacc

SEQ ID NO: 737 - RNA, 144 nt, synthetic construct
  source 1..144: mol_type = other RNA
gagcgtttgggagagctgattctgcagcccagagagtagtctcagggcatcctctggagcctgacctgtgatcgtcgcatcatagaccgccagtagacctgggagcagattcaccgccgcggccgtctcctttaagtgtgaatc

SEQ ID NO: 738 - RNA, 663 nt, synthetic construct
  source 1..663: mol_type = other RNA
gtacagttgtatagcagcacacgccttccctctttttcaccgcagctaagagagagaaagagagtatgtcagtcaagggcgtggagatgccagaaatgacgtgggacttggacgttggaaataaatggcggcgtcgaaaggccctgagtcgcattcaccggttctgggaatgtcgactacgggtgtggtggctgagtgacgccggcgtaagagaaaccgacccaccgcgtccccgacgccgcccgacttggatgaccgcggtgtttcacgttatctgtgccgttttgcttacgcttatgattatggccatcggcgcgctcatcgcgtacttaagatattaccaccaggacagttggcgagacatgctccacgatctattttgcggctgtcattatcctgagaagtgccgtcggcaccacgagcggcagagaagcagacggcgagccatggatgtgcccgacccggaactcggcgacccggcccgccggccgttgaacggggccatgtactacggcagcggctgtcgcttcgacacggtggaaatggtggacgagacgagacccgcgccgccggcgctgtcatcgcccgaaaccggcgacgatagcaacgacgacgcggttgccggcggaggtgctggcggggtaacatcatccgcgactcgta

SEQ ID NO: 739 - RNA, 310 nt, synthetic construct
  source 1..310: mol_type = other RNA
caacagtcctaacattcacctctcgtgtgtttgtgtctgttcgccatcccgtctccgctcgtcacttatccttcactttccagagggtccccccgcagaccccggtgaccctcaggtcagccgactgcggcagctggcgcccgaacagggccctcggataagtgacccttgtctctatttctactatttggtgttcgtcttgtattgtctctttcttgtctggctatcatcacaagagcggaacggactcaccatagggagctgcagtcccgcctacggagaagaggtaggttatggtgagccattggat

SEQ ID NO: 740 - RNA, 372 nt, synthetic construct
  source 1..372: mol_type = other RNA
tgaaaactagcccacctgcaaccaccaatcgggctaggatcacgaagaaccagggctgccccccgcaactgcgcggcgggtttccgcgaacgtttatctgttggtattctagtgtggaccggttaggcgccggtaaacaatttccatcacacttgattccttgtcgggaatctagatcgccgccccaccgtatggtggatcccgggtcgaaggtgaggtgtattttgtggtaggggagggtggtcacctgttggtggctccgttgatcctaccctgagtacgctccgacggaaattgcttacattcgacaaaatcgcctgcaaccgaaacttcccacaccgaaccaaccaaggccagtctccgccacttgcc

SEQ ID NO: 741 - RNA, 297 nt, synthetic construct
  source 1..297: mol_type = other RNA
tctctccaagcccatttacaggcactctacctggtccagcacgaagtctggagaccgttggcggcagcttaccaagaacaactggaccggccggtagtgcctcaccctttccgagtcggtgacacagtgtgggtccgcagacaccaaactaaaaatctagaaccccgctggaaaggaccttataccgtcctactgactacccccaccgctctcaaagtggacggcattgcagcgtggatccacgctgcccacgtaaaggctgccgacaccaggattgagccaccatcggaatcgaca

SEQ ID NO: 742 - RNA, 614 nt, synthetic construct
  source 1..614: mol_type = other RNA
gtttttatgtctacttccacaagggggtggtgctcggcgagcatgttctgtaactgcccttgctagggttcttcacacgagcctcgccttattaaatgtgagttcggcaatgcttacgatctgccgaaacaagtttttatgtctacttccacattcaagcgctttctcatagggattctcattaaagacaagttcggtaacgctttcgattagaaactgttttaggtgcccttatattacaccttacgaggatctccttaaattcgagtccagtaattcctttgagtgacgggaagccttacgagttgcccccccccccccaaaaaaaaaaacaaaaaaaaactgtcttataaggagcatggctaaatgcgacttcggtagtgctttcgacctagcaatctctttttttttttgatttaatctcccttgttaagatatgatgcaataaatacacgacatgaaactttcatttattgacgaattgcaccatttaaactatttgggcgttgttgcacgattatggttatactttacctgcttttgctgcgtagctgttttgtgacgtcaggtttgcaactcctccatcaacgtccccgcgcttccgtctttgtaca

SEQ ID NO: 743 - RNA, 279 nt, synthetic construct
  source 1..279: mol_type = other RNA
tccagcggtccaatcgagaagtaagtagtccgagctgcgagcataactctaccagagaaacgcgcactttattggtcaagacagacggaagccggcggttggacgcaaaggttgactcggaagctgagagattgttgagtaacacgcagaagtcttgaaagtatcaagtattgaacatatttcaagggacttggtttcggtgaagtcgtcaattccttttatcgtcaacgtttccacagccctcagaatagaaatttccaacaagccaaagcctacgta

SEQ ID NO: 744 - RNA, 365 nt, synthetic construct
  source 1..365: mol_type = other RNA
ttaagatactttttctaaaaagatttatttccagagtgttcccatgttggtttaaaattcactgttttcaacattttagagcaatacctcatctacttgattttgtgtctgctgaagtcttcggttgctgccagaggcagcacttgaccctggggttgcacctgcagacctgaaatgggtaaaggcacaagcatgagtaaactatgattccagatacattttttataagtatgaagacattatcccaaggcatcactgtttaaaggttcagaacttaagcagaaaaagaaacccttcctacagtaaggaacaaaggttctaatgacatttcttctaattcctctataatttccaggattcatcat

SEQ ID NO: 745 - RNA, 1730 nt, synthetic construct
  source 1..1730: mol_type = other RNA
ttcagttgtgaatgaatggacgtgccaaatagacgtgccgccgccgctcgattcgcactttgctttcggttttgccgtcgtttcacgcgtttagttccgttcggttcattcccagttcttaaataccggacgtaaaaatacactctaacggtcccgcgaagaaaaagataaagacatctcgtagaaatattaaaataaattcctaaagtcgttggtttctcgttcactttcgctgcctgctcaggacgagggccacaccaagaggcaagagaaacaaaaagagggaacataggaacaggaaccagataatagtgacataagcgaccctttcgcaaatattttggcgcaaaatgagcgggcgccaagtgccgcgtggtggagccgcctgaaaatgacatggaaaattcgccgaaaatcgcgcgttttggcagcatcaatcccaaagcacaaaattaatttctatcataatttctgggtgcaacacggacccataattgaatcgaatatagggcttatctgatagcccggcagcaacattgaactttccggctgcaaaggagacgacaccgagatcgccaattttcgttgggctcgttctctgggctccggcgataagaaatccatgctgataaggacaggaggacggtctgcggcaaattgaattcgattctgacctgtatgaaagccagcggagatacggatacctctgggtttatgggtagaaaacgcagagcgtcgcgccaacatcgaaattatttgcgtttgcatcttctcgtcctttcgtttatcgttctgattgccatcgtggtggcgcggtttctattaattttgcttctgtatcgtttgcaaaatctcaaaagattcaaaaagttcgtcatcagcagccgcaacacaaaaaccaacgagtgtaaagccgagcatacaaatatcaataaaaacataaacatttacccaatctcaatctcaaaacattcgcatcgtttccacacaaatatgcttagttcgcccaaattgtgattgtatatatatatttaacggcattaaatacaaaagattaagccctaaattaagtgtaaatcttacaaaacgtctacgtttttaaacaagaaattgtgatattatatattaatcgggaaattcgaagtatgagaacaaaacggtgtatatatgtaagtgggcgatgaacatcaatgaatattttagctgagcaaagtacacacgaatgaatataaatatacatgaaaatatattttgggcaccgacttttacaccacaattatatatcgatagaaaagacacgaaaacaatcacagaaaactaagagtttcaaaatcaaaattgaggaataccaactagaggataaggctacttaaggatcaaaaaacaccaaggagacgagattttctaccaaatcgagagacgaggggcaggttaatttcgtcatttttggccaagacagcaaatagaggaacagcaaagcgaaaatcattttatacctcacacaacaactacacactaactaagattaggctacgcaactgtacattgtacttaagtgttcaaagtatatttagtttactttgtatataagaaaagtagctaaaagcacgcggacagggaggcaggagcaccacagtcactagccactaagcagagtcacagtcacgatcacgttcactccaggatcaggactcggggcgggatcagcagacgctgaggaagctgccacg

SEQ ID NO: 746 - RNA, 255 nt, synthetic construct
  source 1..255: mol_type = other RNA
tcaattctattcaaacaagtaaagtgaacacatcgctaagcgaaagctaagcaaacaaacaagcgcagctgaacaagctaaacaatctgcaataaagtgcaagttaaagtgaatcaattaaaagtaaccaacaaccaagtaattaaactaaaaactgcaactactgaaatcaaccaagaagtaattattgaagacaagaagagaactctgaatactttcaacaagtcgttaccgaggaagaagaactcacacaca

SEQ ID NO: 747 - RNA, 149 nt, synthetic construct
  source 1..149: mol_type = other RNA
agtcttgaaaaaaatttcgtacggtgtgcgtcgtaacaacaagcagcgtctgaaaagttttgtgaatttccaattctatacaaagcaaagtgaaaatatctgtatttttacctttattctgtgaatagaacgaaaaacatacatacaag

SEQ ID NO: 748 - RNA, 200 nt, synthetic construct
  source 1..200: mol_type = other RNA
ccatcgcagcgaacgcatctcgaaaaaatcattgaataagagagacaccagaacaaagtgaacgaactcgaaaatacgaaagaaaagtgtgtgcgccagcaacaaagaactaactcgataaatattcattgtgcagaagagaaagttattgagtcactaccagttgtgtaattccgaacgagaagaaagataaaccaaca

SEQ ID NO: 749 - RNA, 963 nt, synthetic construct
  source 1..963: mol_type = other RNA
acattcgttcgatggcaacggattggataacaggcgcgcgctttgttttattatccacattatcagcggcattattgttattattggccctcagcgctttaccgctcgcccacgcgtccgcccgtgaatgccgcgcggaaaagtcgctttccactagattggcgtccagattcgaggaaatccgtcagcagacgcattcgcgcccgttcggtcagcactatggctaataatcgttcaaatcgttaaaaccataaaaataataataataattgcaataacaataaacatagtaataatcgtaacgcttacgagcctttgatagtgccaaggcaagcgcaatccaagtattcaaattcgaattcaattaacagcaaagtgcaattggctaaaaaccgaaaccaaaacgcaacaaagtatacgaaacacttgtgaaaccgtacaaacaattgtggaaaaaaatttaaagattattaagattgaagtctcaataaacattagtgcttaaataaatttaaaacgacccgcgtggagagtgcaataaaaagaataacttttgaaataaatatttaccaaacagaaaaatattttataaatatttaaataagtgaaaaacaaattggttactctgaaacaaagaaaattcaaattggtgctaaaacaaaggagaaaaaatttcaagaatattttacaaataataagacatatttaactatataaaaccaaacttaatcaacaaagacttggagtgaaaatataaaataaattttaaaaagagtttaacaaaatttgtttaaatccaaaggaggcaaaggaacagcacagaaagcgaggaaacactcaaataaaatccgccaaaaatcgcagatccctggaaaccaattcgtgtgaaatcggtcaagcccccaacgacttttagcccgtctcagacggagcaccgccaagattcttaccgccagcagcgca

SEQ ID NO: 750 - RNA, 301 nt, synthetic construct
  source 1..301: mol_type = other RNA
gcgccggagcgggcagggccgagcggcagcgcggagccggggtactcgcggcggcggcggcggcggcaggagcggcgcggcccggcccggcggcggcacagcgcggcgaggcggcccgggaagcacagcgaggcccgcggggcgccgcccgcgccgggaggagcggcggcgtcccggcgagaagtaagagctccgcgcactccttcctccaacccgcgcggccgggagcggtgtggggcggcggccgggaccgtccagcgcgctgccgcggctcccggcgccactccgcgggctctgttct

SEQ ID NO: 751 - RNA, 82 nt, synthetic construct
  source 1..82: mol_type = other RNA
gggttccctcagcggatcgggccacctcggggagcggcgccccttttctttcgggtcgttgctgcagagggaaaactccagc

SEQ ID NO: 752 - RNA, 166 nt, synthetic construct
  source 1..166: mol_type = other RNA
ccgccgcccattcagcgcaacagccgtcggtcctctcgctttcccgtaggggccgtcggcgttcgtttgaaacgcggtccacccgtcccagcgtagccggcgctcttcggcgccgcgcgcaaacttcccgagccggcgggtgcgggcggtggcagcggggcccgga

SEQ ID NO: 753 - RNA, 286 nt, synthetic construct
  source 1..286: mol_type = other RNA
gcacagagcctcctcggctgaggggacgcgaggactgtcctcgccgccgtcgcgggcagtgtctagccaggccttgacaagctagccggaggagcgcctaggaacccgagccggagctcagcgagcgcagcctgcagctcccgcctcgccgtcccggggggcgtcccgcctcccaccccgcctctggacttgtctctttctccgcgcgcgcggacagagccggcgtttaggcccgagcgagcccgggggccgccggccgggaagacaacgcgggcaccgattcgcc

SEQ ID NO: 754 - RNA, 200 nt, synthetic construct
  source 1..200: mol_type = other RNA
cgagtctctgagaagagggagcataggctgtgctgatttaaaaacagaaaatgcaaagttggactgaaaatatcccacgtcttctaagcaatctgcttaaggcttccaaacttaccttaatttggtaagaaaataagctgccctatttttctttcttcttctcttacaactggaagcagccatttccccaaaccaccacc

SEQ ID NO: 755 - RNA, 418 nt, synthetic construct
  source 1..418: mol_type = other RNA
ctggcgtcccggccgaggcagcatcccagcctttaccctgtgggcccaacgtgaggagtgtgaggagcggcatgcggcgccccctggctggttcggtgtcttttgacctgctgttgactgctcccagggggccctgacgccctggggcacttttgctctgcacaggaccacgctggggtttgccatggtgacataaaggggtgtagaggaaggaaggagcaagaccagcctgtagactgtgcccctggctgggcaaaagggccaggggcccggagccttccctccactgccctcgaacgcctcacttcctaagtctctgcatttctcagtcagtggacagcttttgggactcttgtgtgaggactttgggggaccaggccaggctgggcctctgctgattgagatcttgggatccaga

SEQ ID NO: 756 - RNA, 750 nt, synthetic construct
  source 1..750: mol_type = other RNA
tgccacccggcgtggaggacggggtccaccctggtgggctgagcgcgaggccggagggctgggaggctgcggctgggctgagcactgcggagggccgtcggcttatcccaggtcccggtcacgcagcggccacgctcggggagcgcgcggacctgagcgggcaccacgagccgcagcgcgccgcctccccctggtgggagcggtacttgagcccgactgcggcggagcgttcgctcggagatggcggagccgccgcgacgcggcccgaggccccgcgagcagggaagccgggcagccccgggacgcggcagggcccggggacagcggggacgccgcccactccaccgggtatgaagctaaaatacagtggttacaacacaggaggttgacaggcctgacctttgaatcccagttcatccacaaacggagctttgtaatctcggattgtaagggccaagcttgtggactttagtgacttctgatctaagaacctccaccagggctgagggagctcaagtttcagcctgaggcatgggccaggaggccatggtgacctgagacccgtggattctgtccagtacaccctgttgctccttctgcctcccctctcctgtattgaaagcgtttgtgttcatcttatcagggacctgaccctaagagaatccttcccctgccaaggcagttccagcccccagaactcatcaccccatctcctgaggtggttcctatcctccctctcttctcctcgcc

SEQ ID NO: 757 - RNA, 247 nt, synthetic construct
  source 1..247: mol_type = other RNA
ctgggggaggcggctgcagccgtggctctgcagcgagagcgcagagaagcagaggaccaagaggcagaatgccggcgctccaccgcccgagactgtgtttcctgtgagtccagatgtgtgatccagatatgctgcaatggtgacataaactgttgactgagactaggagcgtgcctgaaactccatccctcctcctattattttttaatggtgcttctactggaatagtcaacaaagtgcacccaac

SEQ ID NO: 758 - RNA, 515 nt, synthetic construct
  source 1..515: mol_type = other RNA
agaagcagacaggagcagctggtattccggtgattaaatagttctcatagcctttttgctgtacccggtctgctccctggggtaaggctcgtgtccgagaaggaagctgcattttaacggtgtgctgaacagaggtctgaatcattccagctggctgcttgttttgaaaaggacaatgtgtgtataaataaaaagactgctggaagggtccagacaccggcaccggagctgaggagtgctctcagaatcctgttgaggcagatggcacgaactgaaagctccgctaattaacgtggagccaagtaaacctgaattctggatatctcattttctaacttcggataaattcaagttagcaaaagaaaaaaaaattgaaatgcttctctagataatgcttaaaggaccctgcagcagttcttggtattggacatagcatctcagctgttgcctcctggtccgctgactaccagatttgactcatttgtgattccttcgagaatctcccatgatttgca

SEQ ID NO: 759 - RNA, 1018 nt, synthetic construct
  source 1..1018: mol_type = other RNA
agcgcagaggcttggggcagccgagctgcagcgaggccgcggcactgggggcgagctgagcggcggcagcggagctctgtcgcgagacgcagcgacaaggcagactattcagcggactcaccagcccgggagtctgtgctctgggatttgatattcaaacctcttaatttttttttcttaaactgtattgttttacgctttaatttatttttgcttcctattcccctcttaaatcgtgccaacggtttgaggaggttggttcttcactccctcaaatcacttcggattgtggaaatcagcagacgaaagaggtatcaagagctccagagagaagtcaaggaagagagagagagaccggtcagagagagcgcgctggcgagcgaacagagagagggacaggggcaaagtgactgacctgcttttgggggtgaccgccagagcgcggcgtgagccctcccccttgggatcttgcatcggaccagtcgcgctgacggacagacagacagacaccgcccccagccccagcgcccacctcctcgccggcgggctgccgacggtggacgcggcggcgagccgcgaggaaccgaagcccgcgcccggaggcggggtggagggggtcggggctcgcgggattgcacggaaacttttcgtccaacttctgggctcttctcgctccgtagtagccgtggtctgcgccgcaggagacaaaccgatcggagctgggagaagtgctagctcgggcctggagaagccggggcccgagaagagaggggaggaagagaaggaagaggagagggggccgcagtgggcgctcggctctcaggagccgagctcatggacgggtgaggcggccgtgtgcgcagacagtgctccagccgcgcgcgcgccccaggccccggcccgggcctcggttccagaagggagaggagcccgccaaggcgcgcaagagagcgggctgcctcgcagtccgagccggagagggagcgcgagccgcgccggccccggacgggcctccgaa

SEQ ID NO: 760 - RNA, 115 nt, synthetic construct
  source 1..115: mol_type = other RNA
gtgtttccaccactccaagaaggcagcattcagagttcttggctaagtcgaccttgtgaggagctggtgataatttgattccatctccaggttccctgtaagcacatcgagaacc

SEQ ID NO: 761 - RNA, 164 nt, synthetic construct
  source 1..164: mol_type = other RNA
accgattaagcacagtacctttacgttatatataggattggtgtttagctttttttcctgagcccctggttgacttgtgcatgaacacgagccatttttagtttgtttaagggaagttttttgccacccaaaacgtttaaagaagaaaagttgtttcttaaacc

SEQ ID NO: 762 - RNA, 523 nt, synthetic construct
  source 1..523: mol_type = other RNA
ggttcggtgttcttctcaaataaaaagattgtaatcatttagtgaaataaaaattatatttttttcacttataaatattgcaagtatttaattggcgcagtcggttaggatccaataaaataaaagagtccttttagtacggtactgatcaactgaaggatatgctatacgactagctatccaagatcagcgaattaaaatagtgattcaaaaatattttttaatccgcaaaagaatctacgtgaaagtagtattcaaaataaaatcccgtgcggtcggaaacaaaaattaatttaaattttttaattccgaaacttaaaaccaagtttaaagaaaacttaaaatcaagaaaacttaaaaccaagtttaaagaaaacttaaaatcaagaaaacttaaaaccaagtttaaagaaaacttaaaatcaagaaaacttaaaaccaagtttaaagaaaactcaaaatcaagaaaacttaaagccaaaataagctagaaaactaaaagacatcatggcagtcccacaac

SEQ ID NO: 763 - RNA, 105 nt, synthetic construct
  source 1..105: mol_type = other RNA
caaaataatgataacgagaataatatcaagaataccttagaacaacatcgacaacaacaacaggcattttcggatatgagtcacgtggagtattccagaattaca

SEQ ID NO: 764 - RNA, 206 nt, synthetic construct
  source 1..206: mol_type = other RNA
tctagactcccggcgaacactcccctccgccttcttatgctcatcccctccgcttccgaagcacaacatttcaaccagaaacactagccgaagcaaatccattccacaagcacctggtgggatcatctcatcatcagaaaccaagagagagattccgtgtccgcttgttgtagtagattgtgaggactgaggaccgagaagcagcc

SEQ ID NO: 765 - RNA, 259 nt, synthetic construct
  source 1..259: mol_type = other RNA
tttttttttctcgtactgtttcactgacaaaagttttttttcaagaaaaattttcgatgccgcgttctctgtgtgcaacggatggatggtagatggaatttcaatatgttgcttgaaattttaccaatcttgatattgtgataatttacttaattatgattcttcctcttcccttcaatttcttaaagcttcttactttactccttcttgctcataaataagcaaggtaagaggacaactgtaattacctattacaata

SEQ ID NO: 766 - RNA, 456 nt, synthetic construct
  source 1..456: mol_type = other RNA
actcagcttacacacaaaaaagcagtaaaatataaaatacaaaaattaacagctgcgtttatctatagatatatatatacacatctatatatttgaataagcgttcgatttgaatcaaaattatagcccaagctatcagctacccccacaagctttgtactccacaaaaacgctaacgagcaaaatcgataaagaccagatagcaaatgaaatcataccatctgccatagatctatgctataaacatatataggtgctgatctgtgctcttgaatttagtgttttttgtgtgtgcgtgtcgcgagaggagcactcaaaaccaaaaaaaaaaaaaaaaacgtatagtaaaacaaaaaactatctctagtcgctaggctataactatacaaactccagctatcccagatccagatccgtaaacagcaaatagttatatatctataaccccaaaatacg

SEQ ID NO: 767 - RNA, 310 nt, synthetic construct
  source 1..310: mol_type = other RNA
ccagtatctccgctggccatcagtcaatcaatcagcagaccgcagcccaaaaatgtttcaattatgttatcgccagcaacaacgacatcgtccagaatcgaaagcatcgaaccagagcagcagcaaccacaagaaggcagccgcactgtccaggacgaaggagtaagacgtgcaattccgcaaaggctaaatccggatacggaaccggagcccactgcaaaaccgaaatcacaaggcaaccaagagcaatttagcatagcaaccgcaacgcaatcagccaggccaggatcagaagcaggacttcttagcc

SEQ ID NO: 768 - RNA, 419 nt, synthetic construct
  source 1..419: mol_type = other RNA
atacacaagtttctctattacgaagcaagcaaaaagtgattgatagttagttctccacaattttttttcctgtttcaaaatttttaaaattgtcaaattcagacctatgggtcccataaatgtttcgtgctgcgttccataagcaaacactaaaatatatcatccgttgaacaaatcgtgcccgtctaactgtcgcgtcaatccgctaactattgtcttgcgatgaacgacaccatggtgtagccaagagaacatcagcattagccaaaccacacagttcccaactcgatccccagagatccatcacccccacaacaagcaggcaaggcgaggtcgtccaacgccaaaaaaaaacaaacttaaaccaacttcacatacacatccggttacgacagcaacatacgtcgtagctgataaac

SEQ ID NO: 769 - RNA, 568 nt, synthetic construct
  source 1..568: mol_type = other RNA
cccaagtgacttaccagatcattgggcctcaggtacatcaaatccatcgacctcgaccagcagcagcagcagcagcagcattagtgccagcggcagcaacaacaacaaatacaacagcggcaacatatcggtctgcaacctgccgcgctcatcgccggccgctgcaacagcagccgttacactatcgtcggccgccggcggtattggcagcaacttgttgagcggcttgcatcacggtctggcgcccggtacgcatccactgcagcgcgcgacggcagccagcggaggcggagctggtgctgggggcgtggcaggcgcctcaacagcagcggcactcacactccagcaacatcagcaccagcagcagcaacaacaacagcagcagcaagcgcaacatcagcatcagcaccagcatcagcagcagacgcaacagcagcaattggcctaccagcaccagcaactgcagcagcagatcatctcgcatcgttccatacaaaacaaggcggcggccaccgctgccgcacaaacggcaaatcttgctgctgccctgcagcgatcggctgccatt

SEQ ID NO: 770 - RNA, 207 nt, synthetic construct
  source 1..207: mol_type = other RNA
aaaaaacgcttttacgaggtatcagcacttttctttcattgggggaaaggcgtgagggaagtacccaacagcagcagactttgaaactttaaacagacaggtctgagagcccgaactctccttttcctttgacttcagcctccaaggagttccaccactttggcgtgccggcttcactttcattaagtgaaagagaggtgcccagac

SEQ ID NO: 771 - RNA, 127 nt, synthetic construct
  source 1..127: mol_type = other RNA
gggaggcgatgaattgggacgcaggcgcgaccacagggaccactccccctacacagacatgagaccataggggagctgtctgggtggcctcaaggataggcgctccccgaggtgtgaatgaggcagg

SEQ ID NO: 772 - RNA, 270 nt, synthetic construct
  source 1..270: mol_type = other RNA
agcactggccgtggccgtggggcccgcgaagggcggcgcgcggctgatgaaaccggctcggattccgcccgcgtgcgccatcccctcagctagcaggtgtgagcggctttctgcccgcagtctctacacagctcagcatcctgacgcctcctccccttgcaggggcgtgaagctacttcagactctgctgtgacgacttggccgccaggcaccgatcctccccggtgagaaggtccacgaatcttactgcagacagatttgctcagcgcg

SEQ ID NO: 773 - RNA, 120 nt, synthetic construct
  source 1..120: mol_type = other RNA
ccgccgcccattcagcgcaacagccgtcggtcctctcgctttcccgtaggggccgtcggcgttcgtttgaaacgcggtccacccgtcccagcgtagccggcgctcttcggcgccgcgcgc

SEQ ID NO: 774 - skipped

SEQ ID NO: 775 - RNA, 694 nt, synthetic construct
  source 1..694: mol_type = other RNA
gagtggtccagcaggcacgggcctgctggcgtgggtcgcagcacccatcactgacccggtgctggaggaggaaaccggcggagcagcttccccactctcagttgcgcgtctggcgatggcgatcagaggtcctgctgcgctctccgctgcgctctccctccattagccgcgctacgcggtgctgcgccctcgctggtgcctcgctcctggctcacaggatcggccccccacttccaggcacgacccccttccccggcccctcggcctttccccccactcagccatctccgacccggggcgcgcgttccccccggcccggatccttctctccctccggggacacccgctccctagccccggctcgaccctccccaaagcgcagcacggagtctcggcgtcccatggcgcaacccacagccttggcccagaagctggtgcggcccatccgcgccgtgtgccgcatcctgcaaattccggagtccgacccctccaacctgcggccctagagcgcccccgacgcccggggggaaagagagcgcgagagcgctgagcagaaagcgggagaacgccccgaagccggcccatggggagcgagtacccagcaccggctagcacgaccgccgcccacaccgcgcccggcctgtgaagcccaggacccccctccccgggagaggcccatgagggcaggagagtg

SEQ ID NO: 776 - RNA, 387 nt, synthetic construct
  source 1..387: mol_type = other RNA
atgaccgatgagcataaaagtaacattaacagtaacagcagtcactccagcaacaacaacaacaacggcagcagcagcaataacgacaacaacagcaacgacgacgcagcaagtagcagcaacagcaaaaacaacaacaccagcaacgagagcagccacagcaacaacaatactagtagcataattgcagaggcggccgccaagtttctactgaaaaatggcctaaacggcagtagcagcaccagctacccccctctgccaccgcctctgcccgccaacttaagcaggacgaccacgcccacgacaacgacaacgccctcatcctccagctccaccgcctcaaatggctttttgccgcatgccaagacgcccaaaagtagtagcatt

SEQ ID NO: 777 - RNA, 270 nt, synthetic construct
  source 1..270: mol_type = other RNA
taaaccccagttttatatcgtatatgctatctacaggtccactttacacttaataatataaaaatactactataaaggaaccagaaaaataaaaaagggtcattatttatttgagcagatcattatcaaacgcataggaagagaaaaaacacagttttattttttttccacacatatttattggtctcctagtacatcaaagagcattttaatgggttgctgatttgttttacctacattttctagtacaaaaaaaaaacaaaaaaagaa

SEQ ID NO: 778 - RNA, 185 nt, synthetic construct
  source 1..185: mol_type = other RNA
gggacgtgaaaattacagtagttactgttttttttggactataagatcgggggaaagataacacataagaaataaaacgactactagttagactgctctgcggaagaagcaaggaagtaaaggctgcattttatttttcttttctagtccaacataaacaggtgtatcaagagaaacttttttaa

SEQ ID NO: 779 - RNA, 60 nt, synthetic construct
  source 1..60: mol_type = other RNA
cccttatatttactcaccttccccctactctaattctcctgatttcagaacaaaaaaaaa

SEQ ID NO: 780 - RNA, 176 nt, synthetic construct
  source 1..176: mol_type = other RNA
cccttaggatactttctgatttacatccgaagaattgggtgcgtcaattaaaggcaattcttcgctctatcaagcagttttactgcgtctgtctaaagaaacaattgttttactgaatttcaacaaagttctaactcgaggtgaccggaggccactgtaataataaaaaatagaag

SEQ ID NO: 781 - RNA, 167 nt, synthetic construct
  source 1..167: mol_type = other RNA
attgaaaaagtgaccattttttactcctgttcaagcgcatttgctttgataccattttgtttgccgaagacacggtgagttgacgttagtaagtcactgaggctataaaaaataaacacgaagacgtttatagacataaataaagaggaaacgcattccgtggtaga

SEQ ID NO: 782 - RNA, 194 nt, synthetic construct
  source 1..194: mol_type = other RNA
ggatccaaggcatattctgttacattgtacctgtaggatttactgagagctgaaaccattgaaaactattctgcaattaattatcttcgtacggactatcactacttttttttaagaaagacttatttctattgtttattgtttataattcactctgaatactcgcttattaattgtgtgataaattctaaagg

SEQ ID NO: 783 - RNA, 342 nt, synthetic construct
  source 1..342: mol_type = other RNA
ggcctctaacaatctggaatagaatgtcgatcaggcacgttcgtgtaaacattacgattttggaattccacttacataagatagcttctttgtaaaagccgttcgaagatttcgtttatagtgatgctttttctggagagatttaagataataaggatatgtggaaggaaatgaaaatgtacacctacaaagcgttgatggtatggaaactatcgaccatagtttgttaaacaggaaatatttgcttgagggtaaagtgttctgattcattatacaaagccccttgcttataagaaaagaaaccaaatcagaaaaggagattatttcaaggtaggcatcgaa

SEQ ID NO: 784 - RNA, 458 nt, synthetic construct
  source 1..458: mol_type = other RNA
cgccccctcacagaaacttatgggcagcttgctgccttaacggaattgactagaattggtttgatttttttttcttcctacttcttcttccatttccctcccctcttcctcatatatgtatacagaaaaatcatacccctataaattccttggccccaatcttctgtcagattttcctttataaaagagtctttgttttgtaattaaaagatacttttttctttcttcttctacgtctccttttttttttttaagaaaatttaacttataccactattttgttcgcaattgatcaagaaaaaatacaattgaaaaggttttacatttttaatttttctgctcatcgcgcttttttaaaaggataaataaacatttctttaaaaaacatcttcaataagaaaaatcggttaaaaaaacttttcttctcaaagcatacctaataacaatataatcccata

SEQ ID NO: 785 - RNA, 400 nt, synthetic construct
  source 1..400: mol_type = other RNA
gccctcttgtttttctttttcatttttttaaatcacacttttttttcttttcaagatttataaatcttccttccaggtttgagccggacccattgtttaattaaagcatagaaggcaacgaaggagtgggttatagaattagcattgcggcaaaaacgtcatatttattaatatttatttgcgaaggtcatattcaacgcaatcgcacgtcctcttccgtcttttttctagcttttgtccttttttatttgtctacatccctttctctacggtatccagaagaaggtgtgtgtgtgtgtgtgtgtgtgtgtctataaaaagcagtaagagtcaccaaaaaaaaaaaacgacaaacaagtgatccgaagtgtgacgaataaagcaaactctccaactcaaa

SEQ ID NO: 786 - RNA, 399 nt, synthetic construct
  source 1..399: mol_type = other RNA
tgacaaaaaataaaaaacgaaatccatcgtgaacagttttgtgtttttaaatcagttctaaacacgaaaagggttgatgaaaaacgcagaagaatccgaaaaactaactaaccgagcaaaaacttgacttgagtgttgtttgacaaatcaggaaagataaaaaacaaatcataagaaaaaactgcacgaaaaatgaaaaagtttctaatattcaaaatcttgcacaagaaatacaaaatcaattaaagtgaactctaaccaaaagttgtacacaaaataaaaagcaaaacaaagcagcgaagaacaatcacaagaagagcaaagtgccaacaaagtgcaggaaggaaggaagcggataaggacaaaaaggaagccagcacacacacacacacccacaca

SEQ ID NO: 787 - RNA, 318 nt, synthetic construct
  source 1..318: mol_type = other RNA
acagtcagtccactctgaaacctcgacgagagaacattgaataacaagcggaagcgaaaagcgcagttgaaagttcgtcaaaaagcgacaagtttcctcgttcgttttcccgccaaatgagtcagaaaaattttccaagtgctcgatacgaaacataaagacttacaagacttaaagtgcaagcagtgaatggaatatattattcctcagcgatattgaaatcaaacattaaaaatatatgctacactaaagttatatatttttttaaagattcatacgttttgtaaaatcacattttgtattaaattaaataccgcc

SEQ ID NO: 788 - RNA, 22 nt, synthetic construct
  source 1..22: mol_type = other RNA
tttataatttcttcttccagaa

SEQ ID NO: 789 - RNA, 105 nt, synthetic construct
  source 1..105: mol_type = other RNA
acaggctcatctcgctttggatcgattggtttcgtaactggtgagggactgagggtctcggagtggattgatttgggattctgttcgaagatttgcggagggggg

SEQ ID NO: 790 - RNA, 1118 nt, synthetic construct
  source 1..1118: mol_type = other RNA
cagtgtttcacgcgatttcgaaacgttgagatcgttgccgcggtcgccgtgaattggaattgtgagtgtgttcgtcgtgcggaaaatcatcgctgtcaaatagaggccacagtgaattgccgatacctaatactgtgcaaggcgaaattatgtgccccagcatttcgtgaatgaaaagtgcgaaaatacaaaatacagagcaatagtgcgaggtcggtggagttcgaattaaagaaattccacgaaatacaagtgcgggcgattctcgtgtgctggcgagagtgcggcttgtccgggtgtatcggcgacgactaaatgcatgattgagatcacgtgaaatgatcatcgagtgccgcgaaggtgtgaaagtaaaaatcatgtgaaaaatgtgagaaaaagtgtggaatgctatgtgacaacaaccacaaatactacttgcaaacaaaagatcaagagagcagcgaggagagcaacaacaacatcgagagaatcaagaaaaatgataacctaaataaatcaaattgctagtcagaaaaaacaaacaaacaaacaacaacaacaacagaaaccagggaactcaaagccacagaaagagagaggaaaattaagttatagaagtgatccgaattccgatcccgcgtgcattttctcccccaatctcaacctctctggtctacgggtttttcccgaatttacaattttcgggttttctcttgccaccgaagaaagctttcgccacaagctggaaagaaagtgccaaggcagcagtgaagaaaaatattatcgaaacgtgtttgaaatttataacaacaaggaaaagcgagggaaggtgtcattcattgttctcgaccaaggtgttctgcgtgaaaggaattgataataatctcactacaaagtgttcaatcaatgagttgcaacggcggaacaaatagaagaaaaattgcattccaactgaagtgaaatatttgttgcgcttttcggctgcaacagagtgtgagagcgggacgaaagatgattacctagcgggggtgagagagacccaaaaagcgaaagcagaactcgtggaaagctgaaaatttgaggaaacaatttcataatacgaatagaaacaccgcaat

SEQ ID NO: 791 - RNA, 207 nt, synthetic construct
  source 1..207: mol_type = other RNA
ggcgatccacttgcctctgcctccctagtgctgggattaaaggcgtgcgccaccacaacgcgtttagtccctttcataaagaccggaggaacagacgtttacggccagctcccgaaaccaagtgaactggaggccaccctgcaccaagggttggaaccttttcacaaaatccacgctcctaatacaaggcaactctgaaccagtgca

SEQ ID NO: 792 - RNA, 125 nt, synthetic construct
  source 1..125: mol_type = other RNA
aggagtggagtatatcaggcgggactcttgcgctccccctcgcactcgcgccttaggaagcttgggtgtgtgtggcgcgctgtcttcccgctcgcgtcagggacctgcccgactcagcggctgcc

SEQ ID NO: 793 - RNA, 784 nt, synthetic construct
  source 1..784: mol_type = other RNA
ctagaaagcagttaacgagtagtctgtgttttttcgcttgcggttaaaagccacgaggtcgttcatcgttcatcgttttccttttcaacttcaagcaaagcaaatataaaccaatgcaaaaaacgcagtgatcttttgaggcccaaatcgtttggggccgaacaccgttgattctaaaacgcaaatgtagaaacaaatcaagaaagtggaaaataaatatgtttcgctttcaaaacatgtgaatgtgccgaactcaaaactgaaacgtagaaggaacgcgttcgttttttacatacgacaatcgtataaaataagagaaaagctccaaaacgtattaaatagcgatgcttggatgatcttcgtagcagtcacgttgtacatacaaatacatacatatgtacctactatatggcacataaaatacgttacgcacactagtggcgaataaaaagcgaattggatttcgctcaaaacaacaacacaatcatatatactacccataaaaaaaaaacaaacccataaaaaagtgcaaagcaaccaggaaaataaagtaaaacagtgccagttaacaacagcaaacggcgatcaacaaatcccaccggcaaaatcaacaattttttaaatcgcaatcaacaaggagcaacaaattagccagctatttcccattgcaaacatttggcggattgattgcgaagctttcacattcgcttcgatatcttttgggctggcgaggattgcttgaagagccgcaaagctgcaactgcacaacgaacttttctacccc

SEQ ID NO: 794 - RNA, 174 nt, synthetic construct
  source 1..174: mol_type = other RNA
gaagtgataatcccaaaaaaaaaaacataacattagttcatagggttcgcgaaccacaagatattcacgcaaggcaattaaggctgattcgatgcacactcacattcttctcctaatacgataataaaactttccatgaaaaatatggaaaaatatatgaaaattgagaaatcc

SEQ ID NO: 795 - RNA, 489 nt, synthetic construct
  source 1..489: mol_type = other RNA
agagtgaaatattactgctgaggaaacgtagcagggcacacgtctctctttgcgtcctggtgcctcatttctccatcacctacttacttcctggttgcagcttctcttcctttgggacttttgcacccggagctccagattcattaccctgcttcactgcggagccttcaggagtggcatccggtgcactgcagagacccgactctccttgctaccttatagccagaactgctgcaggctgattcttcacacacacactctctgctcttcccatgcaaatcagatctcaggtgcctcagcgtcctacccttctggagggctgcagtatagccaccccaagaccttactgctcagtgcctggaatcctgattgcgaactccgggggtcactcgtctccctcacccattgcccagggggcgagagaggccatcacaacctccagtttgtgtcaaggtccagtttgaatgaccgctttcagctggtgaagac

SEQ ID NO: 796 - RNA, 212 nt, synthetic construct
  source 1..212: mol_type = other RNA
tttcggtttcacttccggtgaggggccgcgcctgagagggcgggcagtgaagcaaacggacggcgagcgcgggcggtggcagtgacggcggcgccgctgccggggggcgtgcggtaacgcggcggcggcggcggcggcgacggcggctgggcctcaagcgcctgcagcccacctcccggaggcgggctcccggcgcgaggacggacgagaag

SEQ ID NO: 797 - RNA, 384 nt, synthetic construct
  source 1..384: mol_type = other RNA
accgatgagcataaaagtaacattaacagtaacagcagtcactccagcaacaacaacaacaacggcagcagcagcaataacgacaacaacagcaacgacgacgcagcaagtagcagcaacagcaaaaacaacaacaccagcaacgagagcagccacagcaacaacaatactagtagcataattgcagaggcggccgccaagtttctactgaaaaatggcctaaacggcagtagcagcaccagctacccccctctgccaccgcctctgcccgccaacttaagcaggacgaccacgcccacgacaacgacaacgccctcatcctccagctccaccgcctcaaatggctttttgccgcatgccaagacgcccaaaagtagtagcatt

SEQ ID NO: 798 - RNA, 384 nt, synthetic construct; identical to SEQ ID NO: 797
  source 1..384: mol_type = other RNA

SEQ ID NO: 799 - RNA, 63 nt, synthetic construct
  source 1..63: mol_type = other RNA
ccacaagtcgctgataattcaaacagaaatcatttaccaagctccgtgagaaccttttccaat

SEQ ID NO: 800 - RNA, 29 nt, synthetic construct
  source 1..29: mol_type = other RNA
agtcagctccagcaatccagttcagcaac

SEQ ID NO: 801 - RNA, 188 nt, synthetic construct
  source 1..188: mol_type = other RNA
agcaatcgcctagcgaacagccaacggtgaacacatagcagccacacaagctctatagctgatacaagcaacgaaatacaaacaacgcagtttgtgtaaacaatcaaattgtcgcagccatatcgagtgtgcttacacgtccagcggaaagttttcgaaaccaatccaatcaatcagctaagatgtcc

SEQ ID NO: 802 - RNA, 239 nt, synthetic construct
  source 1..239: mol_type = other RNA
gcgagtcttgccattgggtagactgcccgcctttcctctgcaagtccctcctttcaccctccttcattgggaggggcagcagataaggggcggggactaggccgggcttgtggcgcgctgctccctcctccttacccccccctccctgtccggtccgggttcgcttgcctcgtcagcgtccgcgtttttcccggccccccccaacccccccggacaggacccccttgagctcgcccctc

SEQ ID NO: 803 - RNA, 303 nt, synthetic construct
  source 1..303: mol_type = other RNA
tcagcaggattgggtcagggcctgactaccaagccctgctggcatcatactgcctggggtaacatgggaggcagggccagggggattagaatctctgagccatcacatgctgtcagggggaatgcgggctacagcttcctcgcaggcaggagtctcaggttctcctcattcctgcacccagtaacagccccagtgtgaccagctctgtggtggggacacctggactccttcttacagttctggtgctaagggaccacttccaaagctggggaaccccagggaggggtcagtggccagataccc

SEQ ID NO: 804 - RNA, 249 nt, synthetic construct
  source 1..249: mol_type = other RNA
ctccagttctccccgcccaccctacagaaagtgtctcctgattggctttgaggccgcagggctcaggttacattcgcaagagttgcggagcgcgggagaccggacccaagaggagagaggctggttctgcaccgattctgtgctggtccgggagtgcccgacagcccctgaactaccacccagcattgtacaaacccacccccactctgagccaggctccaccccagccaaggaccctcaacaccggca

SEQ ID NO: 805 - RNA, 41 nt, synthetic construct
  source 1..41: mol_type = other RNA
agtcccgagcctaaagcctcgcctgcctgcccagtgccagg

SEQ ID NO: 806 - RNA, 148 nt, synthetic construct
  source 1..148: mol_type = other RNA
gttattctccgaggggcccgacagcccccgggagctccaggatgaggagtccggcagctgcctctgggtgcagaagtccaagctgttggtgattgaagtgaagactatttcctgtcattatagccgtcgcgctgcttctcgacagtcc

SEQ ID NO: 807 - RNA, 102 nt, synthetic construct
  source 1..102: mol_type = other RNA
aaaagaaagaagccagaacataccaccagccctttgagtatacaacataacaaacgtcattactttacaacttgattaggagacagtacagagatctgaagg

SEQ ID NO: 808 - RNA, 216 nt, synthetic construct
  source 1..216: mol_type = other RNA
agtgctctggcgagtagtcctccctcagccgcagtctctgggcctcttcagcttgagcggcggcgagcctgccacactcgctaagctcctccggcaccgcgcacttgccactgccactgccgcttcgcgcccgctgcagccgccggctctgaatccttctggcttccgcctcagaggagttcttagcctgtcccgaaccgtaaccccggcgagcag

SEQ ID NO: 809 - RNA, 362 nt, synthetic construct
  source 1..362: mol_type = other RNA
gaattccggggcggcggccgcggggatcccgcgagcggcccctgaacatctacccttcttgccgggacccgggaggtccccactggcctccgggcccgtcctgatcagactcgtgtcgacctccccgtccacgcgcatccgggagagccgcgccacgagacggacccgggcccgccgggacccctggtgtctggccctgcgtcgagaggctggtgactgccacccataagctccagcttcagcctcggcttactcccctcaggggcttgcaggctgaggcctgccctcggacgcggctgaccagcctctccctctcttccacactttggacttctctttggacctcctaaaaaggctccatc

SEQ ID NO: 810 - RNA, 648 nt, synthetic construct
  source 1..648: mol_type = other RNA
agagagtggaggggaccaggatggcagcataggagccaaccatcaagcagcagtctctggactagaaatccaagagcataaaacgctcctccgagctgccgcttctgctcctgcctgcgctcaccctctggtgggagccgagagcggtgggagcacacggcttagctgggctttccaattcctgcaggcgacgcccatggtcctggacggcaccttcaagacaacttagggaggtctactctctccagttccaaaagaaagtttggacaaagtgaatttggggtgcatttgggagatggcagctgctccctctgcttcctctgtgtcacctctcagaagcccctgcctccaacccactccaaccttcccacactgacacccagctcccagtccctctttttctttctttggtccctgagcctctctggggtcagggatgttggtcctgttcccttctcctttcattgtcctttccatctgtctgctgagctgtctcacctgtttctaccttcaccccatcgtcacccctcacctcccttctctccacctctaaacctttctctctcattccattttatctatcaaagttcttacttgcacccatacctccatccaccttcccctccttctctccctgaaattctaact

SEQ ID NO: 811 - RNA, 300 nt, synthetic construct
  source 1..300: mol_type = other RNA
ggaagatatgaccacctcctgattatttttgcagcgggaaactttgaaatatttttcattgctttctcccatactaagattgtgtgtgaggcagtgagggagtcccttgacttactcaagtcatttcattggattttaattacaactgatcatgtgattgtttttttccatgtaaagtttggggcttcaaactttgcttctggagaatgccttttgcaacacttttcagtagctgcctggaaacaactgcttagtcatcggtagacatttaaaatattcaaaatgtatggagaatgggga

SEQ ID NO: 812 - RNA, 404 nt, synthetic construct
  source 1..404: mol_type = other RNA
gtttctcctccgcggccagctcgggcagcccgagtctcctctgtcgcccgcacctgcgcgtcgcggtcgtcccgccctcggcggcggctcacctgggcgcagcgcgggcagggcgccgcctccgggacgcaggtggagcgggcagggcgcgggcaccatgagcagcggcgccaacatcacctatgccagccgcaagcggcgcaagccggtgcagaaaacagtaaagcccatccccgctgaaggaattaagtcaaatccttctaagcgacacagagaccggctgaacacagagttagaccgcctggccagcctgctgcccttcccgcaagatgttattaataagctggacaaactctctgttcttaggctcagcgtcagctacctgagggccaagagcttctttg

SEQ ID NO: 813 - RNA, 183 nt, synthetic construct
  source 1..183: mol_type = other RNA
ggaggagccccaggagtgaagaaatttggagtctacgtgcgctcggaactgtgtcgtgattaaattagtcagccctcagagacaggcgtcctacctcctttatccagacctcaaaagccccgttgtgcacccgtggtggcttcttcaccttccctgtttcgtcctccactgtatggcccagac

SEQ ID NO: 814 - RNA, 193 nt, synthetic construct
  source 1..193: mol_type = other RNA
gcggagcttctgggttgcgggccgaaacggcaagcggatggagggcgctcgaacggccaggtgtcgtgattaaattagtcagccctcagagacaggcgtcctacctcctttatccagacctcaaaagccccgttgtgcacccgtggtggcttcttcaccttccctgtttcgtcctccactgtatggcccagac

SEQ ID NO: 815 - RNA, 1015 nt, synthetic construct
  source 1..1015: mol_type = other RNA
ctgaagttaacaacgaaaaattaacgccagtcggagcagcctgaggctctcccgcttctcagctttagcgtcgtcagaccgagaagtggttcccggtcctgagggtgaagtggggagccgaggacgcaggcggcgatgtcctaggcggggacctcctccctacagcttcgggcgccgagcgagcgcagcggcgcttctagcggccggcgggcggcggcagcggctgcgatccgcaggctccagatctgtcgccccgagatccgctctccccccgcccccacttacctcccggcaccttgaaacgcgaggggggcccggggcactttgcaaagagcaggagggacgaggctgcgagctagacggcggcgaaggagagggcgagaggagaagccggggaaaggaaggactcggcggccggaggactcggagcgcgctgccggcgcggggagcgcgcagcggcctcggaggaggaggcggaggaggcggcgcgggcaagcgacggcgccgcgagctgggcagccgcgctctgcttggcggtggcggacagcgaggagccacacgcaccgccgagatggactgctgaacctgcggggctccactaccgtactggaacccggagcggggcgccagcgcacccaggacacggtgccccaaggggcccctactgcaagctgttaacttcaagtcccttgcggcggctgggccaaacacgcccccgcgtcccgctcgtagcagccaccgccagggactcccaagcctcccggtggagatccgcgcctctcgggtgtccccacccgctaccccgactctgtccggtctccagtcgccggccccccagcagactccgcccggcacacggcttcctcgaacttgatttctcacctcctctgtcccgtcacctccatcctctttccgcccccgtctcgcctccaccccctcgatttcctcctcctcgccccccatttccaccctcctccccctcccccggccacttcgctaacttgtggctgttgtg

SEQ ID NO: 816 - RNA, 204 nt, synthetic construct
  source 1..204: mol_type = other RNA
atgcttcattcgcctcacaaacaaccacagaaccacaagtgcggtgcaaactttctccaggaagactgcaagaaggctctggcgtttaaatggttaatctctgcaggtcactaccagccaccgagaccaaccgagtcatttaaggctgcaagcagtatttacaacagagggcacaagttctatctggaaaaaaaaggagggact

SEQ ID NO: 817 - RNA, 344 nt, synthetic construct
  source 1..344: mol_type = other RNA
ccctgaggtgcgcaccgatatcgatattcgtgccggtttagcggttctgcgacccaaagagtccagggagatccaccgagtggtgcctggcgtataggactatgcagccgccttgtggctcggagcagcggcccgcgatgtcccagccactgtgaaccatttggtcagcgccaacctgctcagccccagcaccgacaggctcagcctctggtacgctccactccgcgggaggccaccagcaccaagcagcaagagggcgcagggaaggcctcccccctccggcgggggacgcctggctcagcgtagggacacgcactccgactgactggcactggcagctcggg

SEQ ID NO: 818 - RNA, 93 nt, synthetic construct
  source 1..93: mol_type = other RNA
tcgccatattgtgcggcggcgccggcggttgattctcgagtctcgctccggccactgccagcgcacccccgggctggggcaggagccgaaatg

SEQ ID NO: 819 - RNA, 87 nt, synthetic construct
  source 1..87: mol_type = other RNA
agcttgcttttcaacattattatgatggcatgtgataaagtaaattatttaatttatttttgatcttgttgacttacgagttcagga

SEQ ID NO: 820 - RNA, 100 nt, synthetic construct
  source 1..100: mol_type = other RNA
ttatagtcacgggatctcacgtgattatatatcatgtgctctacgtaggaaaaaaaattcatggtagcagctctgtgaggtgcatggtagcaggttcaaa

SEQ ID NO: 821 - RNA, 174 nt, synthetic construct
  source 1..174: mol_type = other RNA
aaaaacttccggcgggaaccggaaggtgcggtggcactcacggaatctcgggtcttctgacgtgccgggcgggaagatgtcatcattgccaagaagagcgaaagtacaggtccaggatgtggtactgaaagatgaattttcttcattctctgagttatcatctgcctctgaaga

SEQ ID NO: 822 - RNA, 174 nt, synthetic construct
  source 1..174: mol_type = other RNA
aaaatccaccccaacaatcgctgtgtgccgctttagtgcgctcgccgtcggctctacctgcgtgctttagctccttctcgcctgatccttctgtctctcccaaccccggacacccggcttcgactggttatatcttcggtgttcttttcctctcttcttctttcgcggttcagc

SEQ ID NO: 823 - RNA, 174 nt, synthetic construct
  source 1..174: mol_type = other RNA
aaacgtcaggtatcttttaaatcgcgatagttttcgctgtgtcaggctttcttcggtggagctccgagggtagctaggttctaggtttgaaacagatgcagaatccaaaggcagcgcaaaaaacagccaccgattttgctatgtctctgagctgcgagataatcagacagctaa

SEQ ID NO: 824 - RNA, 174 nt, synthetic construct
  source 1..174: mol_type = other RNA
aaactggtcactgcagtttctaataatactattcaagtccacacatttcctgaaggagttccagatggtatattgactcgcttcactacaaatgcaaaccatgtggtctttaatggggatggtactaaaattgctgctggatctagtgattttctagtcaaaattgtggatgtg

SEQ ID NO: 825 - RNA, 174 nt, synthetic construct
  source 1..174: mol_type = other RNA
aaagatcgctgtgcagtcagccttaaacactgactgcacccctcccagatttcttttacattaactaaaaagtcttatcacacaatctcataaaatttatgtaatttcatttaattttagccacaaatcatcaaaatgacgaggattttgacagctttcaaagtggtgaggaca

SEQ ID NO: 826 - RNA, 174 nt, synthetic construct
  source 1..174: mol_type = other RNA
aaagcctattttcttttcgtttagatacattgccttttgcctaggctggcgtcgagacttgaggccgttgcagactttggcgcggctcgcgcctcctgcttcaagagcccagcggtgagagctggcctgcggcacgcggcctaatgccagacagtaacagtttggaggatcaag

SEQ ID NO: 827 - RNA, 174 nt, synthetic construct
  source 1..174: mol_type = other RNA
aaaggaaccgggttgtcttgggccgggcagggcgggtggtgactctcaaaaggaaataggatcatggcagcagatgatgacaatggtgatggaacaagtttatttgatgtcttttctgcttctcctcttaagaacaatgatgaaggctcactggacatatacgctgggttggac

SEQ ID NO: 828 - RNA, 174 nt, synthetic construct
  source 1..174: mol_type = other RNA
aaagtcgtcccaccatcaatgaaggcaggccacttccggcgtagccatggcggctaacgctactaccaacccgtcgcagctgctgcccttagagcttgtggacaaatgtataggatcaagaattcacatcgtgatgaagagtgataaggaaattgttggtactcttctaggatt

SEQ ID NO: 829 - RNA, 174 nt, synthetic construct
  source 1..174: mol_type = other RNA
aaagtgctgggattacaggagtgtgccactgcgcctgaccagctttataaagtttatagggacagtgtcaccactttacagaagagggactgaggctctgaggaggaagttccttgccagggtccgagtgtcgccaccctgagaactccagcacccacctccctactctccctc

SEQ ID NO: 830 - RNA, 174 nt, synthetic construct
  source 1..174: mol_type = other RNA
aaagtggctgaatgagaaatgtagattgcagagggcaactggtgtgtttatatgcctgacattatttgggttttcccccctcaggcagaagctgaggaagattgtcattctgatactgtcagagcagatgatgatgaagaaaatgaaagtcctgctgaaacagatctgcaggca

SEQ ID NO: 831 - RNA, 174 nt, synthetic construct
  source 1..174: mol_type = other RNA
aaatagtctactttccggtagcggtgccagggcagtggcctaatacggaactccatttcccggcgtgcctcgcggaggccgctgaactcagaagcgggaggccggttccggttgcatcagcgagggattcacggcgaaatgagactgttcgtgagtgatggcgtcccgggttgc

SEQ ID NO: 832 - RNA, 174 nt, synthetic construct
  source 1..174: mol_type = other RNA
aaatcacactggctacagcgttgtgtgtttcttggtaaacactgggtaaatcagctcctgtggatgttgactgaagtttctatgtttgcaagctaatcctcagcagtttctttatgtattgctgtccttgaatattagcccatttgaaaacgcctgggaagttcagccatcagt

SEQ ID NO: 833 - RNA, 174 nt, synthetic construct
  source 1..174: mol_type = other RNA
aaatggagacttaggtcccctgcaaagcagaggggaggctggggtcacagctggccactgagagacccatccccctcagcaccgtggcttcccagctctccctgtcctcctccccccgacatctgccccttccctcctaaccccaggaccaggggacccagatctggagctttg

SEQ ID NO: 834 - RNA, 174 nt, synthetic construct
  source 1..174: mol_type = other RNA
aacacgcaggcgcgtctcctcaaatcctgtccctacacccctcctctttctcttcatttcgttccccctcctcttgcagcacctcggcaggttcaaactcttctccgggagcgtggcggcgatcgcgaggtcacgtgatgagcatcctgctgcccaacatggcggagttcgaca

SEQ ID NO: 835 - RNA, 174 nt, synthetic construct
  source 1..174: mol_type = other RNA
aacgctcagcgaaattgactgccccactgtcatctgcctctcaatttggtactctgtaactctgtgaccaccaagaagcctttttccgtcccccacaaagctctttttggaaaattccctacgggagctgaattttaagcccatttactttataggaagaaacagaaaggcagc

SEQ ID NO: 836 - RNA, 174 nt, synthetic construct
  source 1..174: mol_type = other RNA
aacgtggtggggcagggcctccgagcgtggttggactttgaaggggatcggccgccatgctgcatcccctttttggaattgctcaaccaggtggtaaccggcgccgcttcctggccttgggaggtggttcctttcttaacccacaagaacctctcccaagagaacttggtcctg

SEQ ID NO: 837 - RNA, 174 nt, synthetic construct
  source 1..174: mol_type = other RNA
aactcgcgggagcgtcaccgtcctgcgacgcttcagaggatccttaggcctcagtggtctttgacccccggccccaggacctgaccccaaggaaacctccgggacctgtggctggagagggactttgaacatgtcggggatcgccctcagcagactcgcccaggagaggaaagc

SEQ ID NO: 838 - RNA, 174 nt, synthetic construct
  source 1..174: mol_type = other RNA
aactcggtgagtgacctgcgatgtccgcgaccctcaaccttggcccagcccgcgagccgcgcctgggcctggacttaggatggaacccttccggagaaggctgtacgcagggcctcaaagacgtcccacccgagccgacccgagacatcctcgctttaaagagccttccccggg

SEQ ID NO: 839 - RNA, 174 nt, synthetic construct
  source 1..174: mol_type = other RNA
aactgggcggtaaaatagcccttctgttactgtccggggctgcggggtgagaggccagggccgagaagggcttcaggacgcgggaggcgcacttgcttcaagtcgcgggcgtgggaacggggttgcaaaacggggcctctttgtccgggcttgcttccggcgtcatggctcaaa

SEQ ID NO: 840 - RNA, 174 nt, synthetic construct
  source 1..174: mol_type = other RNA
aagaaaatcctgcttgacaaaaaccgtcacttaggaaaagatgtcctttcgggcagccaggctcagcatgaggaacagaaggaatgacactctggacagcacccggaccctgtactccagcgcgtctcggagcacagacttgtcttacagtgaaagcgacttggtgaattttat

SEQ ID NO: 841 - RNA, 174 nt, synthetic construct
  source 1..174: mol_type = other RNA
aagaagaaaaatgtgttgtgagcagggggagcctcagctgcctcaggccgttcaggacagaagggtgtttctgaaggccggagcaagttttgaagaagtccctatcagattacacttggttgactactccggagcagccactaagagggatgaacaggcctgcgtggaaattga

SEQ ID NO: 842 - RNA, 174 nt, synthetic construct
  source 1..174: mol_type = other RNA
aagaaggaaactagctgggaccgtgcagattcatcacaagagagctacaagagcctggaagaagctgaagactgctaccctccatccttactcaccctggacctgagagacctcttcaatcaggtggagcaaggccctctcctgtcctgccccaaggctggcacagacttgagc

SEQ ID NO: 843 - RNA, 174 nt, synthetic construct
  source 1..174: mol_type = other RNA
aagatactcctcacctgctccttgaatgacagcgccacagaggtcacagggcaccgctggctgaaggggggcgtggtgctgaaggaggacgcgctgcccggccagaaaacggagttcaaggtggactccgacgaccagtggggagagtactcctgcgtcttcctccccgagccc

SEQ ID NO: 844 - RNA, 174 nt, synthetic construct
  source 1..174: mol_type = other RNA
aaggaagctgtaaatgtatttgagttaagcttttgcgagaaaccctacagcttggggcctgggctcctctgaccatcctcattgagaaaggaaagtgagtccagagaagttgatgcttcctacctgttggagcggcccagcagtgtaagcgtggttgttactgccccatccgcc

SEQ ID NO: 845 - RNA, 174 nt, synthetic construct
  source 1..174: mol_type = other RNA
aagttgaaaaagctgcatgcagttggaagggatcttcagatggtgctggtgactttctgttccttttggagttgacatgcatgtggattggaggaaaaataatcaacatatattctcctttcgtactgtttaaatcacaggaagaagcggctttaagacaaagatcaaaccaaa

SEQ ID NO: 846 - RNA, 174 nt, synthetic construct
  source 1..174: mol_type = other RNA
aatattagagtctcaacccccaataaatataggactggagatgtctgaggctcattctgccctcgagcccaccgggaacgaaagagaagctctatctcccctccaggagcccagctatgaactccttctccacaagcgccttcggtccagttgccttctccctggggctgctcc

SEQ ID NO: 847 - RNA, 174 nt, synthetic construct
  source 1..174: mol_type = other RNA
aatgctaaaggaaaaattttcttagcaatttcacaggaaaacctaagttttaagagaggttatcattctgactgggaactgaactattatgactaggtctataatttaataacaagtcacaatatctctctttcttgacatcaatttaaggtgacttttcacatagtagagaga

SEQ ID NO: 848 - RNA, 174 nt, synthetic construct
  source 1..174: mol_type = other RNA
aatggactctagcctcctctgatagcctcatgccaggccccgtgcacattgctttgcttgcctccctcaatcctcatagcttctctttgggaagcctttgggtctgaagtgtctgtgagacctcacagaagagcacccctgggctccacttacctgccccctgctccttcaggg

SEQ ID NO: 849 - RNA, 174 nt, synthetic construct
  source 1..174: mol_type = other RNA
aattggaggagttgttgttaggccgtcccggagacccggtcgggagggaggaaggtggcaagatggtgttggaaagcactatggtgtgtgtggacaacagtgagtatatgcggaatggagacttcttacccaccaggctgcaggcccagcaggatgctgtcaacatagtttgtc

SEQ ID NO: 850 - RNA, 174 nt, synthetic construct
  source 1..174: mol_type = other RNA
acaagcacatgaacatgaagccggccactgcctctgctctgctcctgctcctgctgggcctggcctggacccaggggagccacggctggggtgcggacgcgtcatcactgcagaaacgtgcaggcagagccgatcagaactacaattacaaccagcatgcgtatcccactgcct

SEQ ID NO: 851 - RNA, 174 nt, synthetic construct
  source 1..174: mol_type = other RNA
acaatcctttgcggtggttcaagatggcggcgcccagtggcactgtgagcgattcggaaagtagtaacagcagtagcgatgcggaggagctggagcggtgccgcgaggcggcaatgccggcttggggcttggagcaacgcccgcacgtggcagggaagccaagagccggtgctg

SEQ ID NO: 852 - RNA, 174 nt, synthetic construct
  source 1..174: mol_type = other RNA
acactacttatcattgatgcatatataaaaccattttattttcgctattatttcagaggaagcgcctctgatttgtttcttttttccctttttgctctttctggctgtgtggtttggagaaagcacagttggagtagccggttgctaaataagtcccgagcgcgagcggagacg

SEQ ID NO: 853 - RNA, 174 nt, synthetic construct
  source 1..174: mol_type = other RNA
acactaggtttttacagcaattctctgatgaccttgatatggtagaacgctgtgtatttcaagagtaagctctcgtttgaggagactaacaattcctgttttcgccagatttcttcttgaatggcaacctaaatgccagtccaaagaggcccccaatagacttgttcacccttc

SEQ ID NO: 854 - RNA, 174 nt, synthetic construct
  source 1..174: mol_type = other RNA
acagatccgccatgacaaaggaggagagtcggggacttgagccgtggctccgacttgggcggagcctggaggggggtggttgcgatacggggaccggagaatttgcactttaaagtccgggtctgcccgttttcgtttcacagtaaccgacgtctcaagtcagaacatccagtc

SEQ ID NO: 855 - RNA, 174 nt, synthetic construct
  source 1..174: mol_type = other RNA
acagtgctttcaaaagaattggcgtccgctgttcgcctctcctcccgggagtcttctgcctactcccagaagaggagggaagcacaggtgggtttctttagctctgcgtcggatccctgagaacttcgaagccatcctggctgaggctaatctccgctgtgcttcctctgcagt

SEQ ID NO: 856 - RNA, 174 nt, synthetic construct
  source 1..174: mol_type = other RNA
acagttagaaaattaggaaaacagtggtttaacttgaattctctcttgacgggtccagaattaatatcagatacatatcttgcacttttcttggctcaattacaacaggaaggttattctatatttgtcgttaagggtgatctgccagattgcgaagctgaccaactcctgcag

SEQ ID NO: 857 - RNA, 174 nt, synthetic construct
  source 1..174: mol_type = other RNA
acatctctcagccctctcagctgcaccggaccaccaacagttgtgattcaatgggcatgaattgctgtgtgatgctggggaggtgtttgtgattcttgacaaagtcatttgaatccatcacttcaagagagtgaaaggagccccgtctgatctgttggtgttgtaggaagaaac

SEQ ID NO: 858 - RNA, 174 nt, synthetic construct
  source 1..174: mol_type = other RNA
accagctgatattttctttcctcaggaccagctgttcaggagcatcccggacgagagccaggcacatttgagacttggatccaactaaagaccgccgcagattcttctgcagcaatgtcggtgttagaagaaaatcggccgtttgctcaacaattatccaatgtctactttaca

SEQ ID NO: 859 - RNA, 174 nt, synthetic construct
  source 1..174: mol_type = other RNA
accatagtctgtgtccgcgttcttttttccgggactgcagagttcggggaagctgtacgccgcctttcgctacgcggaatttgcagatcttcccctggacctcaggcctctccggctggagtagggtggacgcttcacataagcttctctggtcgaacttacccgaatctccag

SEQ ID NO: 860 - RNA, 174 nt, synthetic construct
  source 1..174: mol_type = other RNA
acccaggatgcggaggcccttgtggggctgtggccactagggagtttcttggtcacaggacgtgaccccagccaggccctggtgttgaggtcaggacctttaccaggagaagtcaatacctaccagatccagaagattcccagaggtgtgtccctggaatcctccaacctctgc

SEQ ID NO: 861 - RNA, 174 nt, synthetic construct
  source 1..174: mol_type = other RNA
acccccgagcccccgcagccctagagccgcccaagggatggcgatggcgtacttggcttggagactggcgcggcgttcgtgtccgaggtcactagtttcccggtagttcagctgcacatgaatagaacagcaatgagagccagtcagaaggactttgaaaattcaatgaatcaa

SEQ ID NO: 862 - RNA, 174 nt, synthetic construct
  source 1..174: mol_type = other RNA
acccgagcaccttctcttcactcagccaactgctcgctcgctcacctccctcctctgcaccatgaccacctgcagccgccagttcacctcctccagctccatgaagggctcctgcggcatcgggggcggcatcgggggcggctccagccgcatctcctccgtcctggccggagg

SEQ ID NO: 863 - RNA, 174 nt, synthetic construct
  source 1..174: mol_type = other RNA
accggattttccttctccctctctctatctccacagatcccttcccaagaggagtctcctgctaaaacttcatcatctcaagttgacctgccacttcacccaaggaggcaagctcttgcctgtaacagtgtatttgccaacatggcacccaaaaagaagattgtcaaaaagaac

SEQ ID NO: 864 - RNA, 174 nt, synthetic construct
  source 1..174: mol_type = other RNA
acctaactccaacccccgcaattctcgctcccttcacctgatgattcagggctgaacaaggccaggatgtccattctaggcccatcggtgctgtcttgctgaaggttgggtcaggcatctaaagggactgtggtaagggagggtgtgacacaggtgtaagctgccatcgtcatc

SEQ ID NO: 865 - RNA, 174 nt, synthetic construct
  source 1..174: mol_type = other RNA
acctgttgtctctcacctctacattggatcacatggtcacctgcctcatggaaatgccttttttaaaacttcgatttgcagaactccactatttttatacctagctacagttttgagaaagaagaatcagaaccctgacccacttacggttgctgggacaattccccctcccgc

SEQ ID NO: 866 - RNA, 174 nt, synthetic construct
  source 1..174: mol_type = other RNA
acgacaatatggcggcgcttagttgcatgaaggcggaaactctgtgacttcgggtccgtagtggggcctgcggtgggagtgggaaggaaggcggagggaaccatgcgaggttctgagaattgcggcgagggtcgcctcgagagacggtttctgagcatcatcgtgctggatgat

SEQ ID NO: 867 - RNA, 174 nt, synthetic construct
  source 1..174: mol_type = other RNA
acgactgcgtgggtgagtcgtctataaaaactcatctctgcgcgtctcttcgccacattcgcttcctgctttcggtgtgtctgttgtgtcttgttgcgggcaccgcagtcgccgtgaagatggcgtctaccagccgtttggatgctcttccaagagtcacatgtccaaaccatc

SEQ ID NO: 868 - RNA, 174 nt, synthetic construct
  source 1..174: mol_type = other RNA
acgcttgcgcgcgggatttaaactgcggcggtttacgcggcgttaagacttcgtagggttagcgaaattgaggtttcttggtattgcgcgtttctcttccttgctgactctccgaatggccatggactcgtcgcttcaggcccgcctgtttcccggtctcgctatcaagatcca

SEQ ID NO: 869 - RNA, 174 nt, synthetic construct
  source 1..174: mol_type = other RNA
acggaaacagaaattgctttgcggcccgcacggaaattgctttccttcggcttccgttcttggtccatgtgagagaagctggctgctgaaatgactgcgaaccggcttgcagagagccttctggctttgagccaacaggaagaactagcggatttgccaaaagactacctcttg

SEQ ID NO: 870 - RNA, 174 nt, synthetic construct
  source 1..174: mol_type = other RNA
acggcggggggcgtgccccctcccagcccagcctccccaacccggcccgcccgccgcgtcgcgggggcatgtgagcgggaagcctaggctgccagccgcgaggaccgcacggaggaggagcaggagcgcggagccgcgagccccgagccccgagcccggcgcctggctgagtag

SEQ ID NO: 871 - RNA, 174 nt, synthetic construct
  source 1..174: mol_type = other RNA
acgtcaccggctgcgcccttcagtatcgcggacggaagatggcgtccgccacccgtctcatccagcggctgcggaactgggcgtccgggcatgacctgcaggggaagctgcagctacgctaccaggagatctccaagcgaactcagcctcctcccaagctccctgtgggtccta

SEQ ID NO: 872 - RNA, 174 nt, synthetic construct
  source 1..174: mol_type = other RNA
acgtccggcttaccgtcgtttacgacagtgtcaggatcgcgggcttgctttccggtagcgtgggctgacgcctcgctcaatttctcacagggctgcgcaggtttcccccgtctgcgaatggaccactggaggggttcaaaggttcgcgtcccagtacgggaatgagcctctttg

SEQ ID NO: 873 - RNA, 174 nt, synthetic construct
  source 1..174: mol_type = other RNA
acgtgtgtatgtgtgtgtgtgtgtattgggtttctctctcccttgtaagaacacagccagcccgccctctcctgctgttgctgcagctctgacttgctttttcctgcctccttcctctcctctctcttcttgcttagcttcttgccttctgatactactcccaagatggaggct

SEQ ID NO: 874 - RNA, 174 nt, synthetic construct
  source 1..174: mol_type = other RNA
actccactagggcacgcaggcgacgagcacactggcagagggcctcccgcagggcccactccccacctggctctcgccccaccatggcccgggaagcaggccaggtttgtgccaggcctgccgtgcccagggggaggaagggctctgtgttctttgcctgtgtctctgtggtga

SEQ ID NO: 875 - RNA, 174 nt, synthetic construct
  source 1..174: mol_type = other RNA
actcgccctccagcttctgccctgcctgctgtgtgcggagccgtccagcgaccaccatggtgaggctcgtgctgcccaaccccggcctagacgcccggatcccgtccctggctgagctggagaccatcgagcaggaggaggccagctcccggccgaagtgggacaacaaggcgc

SEQ ID NO: 876 - RNA, 174 nt, synthetic construct
  source 1..174: mol_type = other RNA
actgctttcctgggagtcaagttaaaacttctctcctgtgaccttgtcacccggcagtggaaagttacccttggctgcagccacgacttccgcatactcttcagaacttgctctgcccttgagttttccagctttcctttaatgcactaaacctttaatattgtattctcctaa

SEQ ID NO: 877 - RNA, 174 nt, synthetic construct
  source 1..174: mol_type = other RNA
actggaaagttcaagagtgtctttgctggctctttcttgaatatttccaaagccttggaagttacaggttttgggtgtgggataaggaaaaactgaatgatagagcacaggtaccgctcccctttcctcatcatgcctctctgtcgcctctttgttcatagttgaccacggcat

SEQ ID NO: 878 - RNA, 174 nt, synthetic construct
  source 1..174: mol_type = other RNA
acttccgcgggcacccaactgtgcgtctcctgcgcgctgacgtcaggtgcgtgcccctgtccggcagccgaggagaccccgcgcagtgctgccaacgccccggtggagaagctgaggtcatcatcagatttgaaatatttaaagtggatacaaaactatttcagcaatgcagac

SEQ ID NO: 879 - RNA, 174 nt, synthetic construct
  source 1..174: mol_type = other RNA
acttccgggatctgtcagccgctccctctgggcttccgtcctccgcccgcgcccgacggagcctgttcgcgtcgactgcccagagtccgcgaatcctccgctccgagcccgtccggactcccccgatcccagctttctctcctttgaaaacactaagaataatgtcactgcatc

SEQ ID NO: 880 - RNA, 174 nt, synthetic construct
  source 1..174: mol_type = other RNA
actttactgcaagccttagtcagagtacaaagggttcctgcttggtggttttgctgcagcttcagagtttagcctgaactgtggcaggattttgtaacttgcacattttttgagaagtctgatggaggtataatgtccacggtcgattatttgaacagtgtttctggagatcat

SEQ ID NO: 881 - RNA, 174 nt, synthetic construct
  source 1..174: mol_type = other RNA
agaacagtttcatttccggagccaccggaagcagcttgcaaatggcgtctccctcgctggagcggccagaaaaaggcgctggaaaaagtgaatttcgtaaccagaagccgaagccggagaaccaagatgaatcagaactccttacggttcctgatggttggaaggaaccagctt

SEQ ID NO: 882 - RNA, 174 nt, synthetic construct
  source 1..174: mol_type = other RNA
agaaccttcaactgtcaagcaccgagctagccaccagcatgctgtactccccagggccgagtcttccggagtcagcagagagcctggatggatcacaggaggataagcctcggggctcatgtgcggagcccacttttactgatacgggaatggtggctcacataaacaacagcc

SEQ ID NO: 883 - RNA, 174 nt, synthetic construct
  source 1..174: mol_type = other RNA
agacaatagaaagcaatgcgcctattcacatggagaatcttccctttcctctaaaattacttagtgcctcatcactaaacacccccagctccacaccatgggtgttggatatcttcctcaccttggtgtttgccctggggttcttcttcctattactcccctacttctcttacc

SEQ ID NO: 884 - RNA, 174 nt, synthetic construct
  source 1..174: mol_type = other RNA
agacttcctccttcacttgcctggacgctgcgccacatcccaccggcccttacactgtggtgtccagcagcatccggcttcatggggggacttgaaccctgcagcaggctcctgctcctgcctctcctgctggctgtaagtgattgcagttgctctacggtgagcccgggcgtg

SEQ ID NO: 885 - RNA, 174 nt, synthetic construct
  source 1..174: mol_type = other RNA
agacttggtatagtgggagagcctgactgaggtggctctagccagtctaattgccgttcctttagctagtggcatcttgattcctgctgtgtcttaactgaccattgtcttaaattctagagtggatcatgacccatgaagagcaccatgcagccaaaaccctggggattggca

SEQ ID NO: 886 - RNA, 174 nt, synthetic construct
  source 1..174: mol_type = other RNA
agagaaggagccagggagggtggcagggaggccacgtgatccgagtcccctcacccctttccttcccacaggtccctggccaaagatttatttctcttgacaaccaagggcctccgtctggatttccaaggaagaatttcctctgaagcaccggaacttgctactaccagcacc

SEQ ID NO: 887 - RNA, 174 nt, synthetic construct
  source 1..174: mol_type = other RNA
agagacacgaatatgtttcagccgcaacaggctgcgtttcagccggaagagtgaaagggcaccttgaaaacgcaagtttatgaatatgtttctgtactttcagaccatcatcaaagaggggatgctgaccaaacagaacaattcattccagcgatcaaaaaggagatactttaa

SEQ ID NO: 888 - RNA, 174 nt, synthetic construct
  source 1..174: mol_type = other RNA
agagccggcgccgtcaccgcccgcattgccgctcccagtcccgcgctcggcacgacatgaaatcccccgacgaggtgctacgcgagggcgagttggagaagcgcagcgacagcctcttccagctatggaagaagaagcgcggggtgctcacctccgaccgcctgagcctgttcc

SEQ ID NO: 889 - RNA, 174 nt, synthetic construct
  source 1..174: mol_type = other RNA
agaggaggagggcacttttgtgtgatggcaacttcacttctagggcgtggtgcttgctcccgaatcagacgccggcagccaaacttgtcccctcctgtagagtaggaagcggccgggcgccggggctgttgggggtgccaggaagaaccgaggttgggatcgactcctctggcc

SEQ ID NO: 890 - RNA, 174 nt, synthetic construct
  source 1..174: mol_type = other RNA
agagtggactgagcagccagtaggggagagagcagttaaggcacacagagcaccagctccctcctgcctgaagatgttccaccaaatttgggcagctctgctctacttctatggtattatccttaactccatctaccagtgccctgagcacagtcaactgacaactctgggcgt

SEQ ID NO: 891 - RNA, 174 nt, synthetic construct
  source 1..174: mol_type = other RNA
agatggcgtgcttgttggagaccccaatccgcatgagcgtcctttcgtttttttaaagaaaaagacgactttcacctttcactatgttgctcttgaaccaggaccaggaatgaaagttactgggagataacttcgaaggattttgcaacaaattcgagctgtccgactctgaga

SEQ ID NO: 892 - RNA, 174 nt, synthetic construct
  source 1..174: mol_type = other RNA
agattgctgaattacgtgcctccttcggagaaccccacccagtcccgggcccagggcagtaacttgcccattggaaaggggaaagcagaggccacactcagtgacaatggccacaaggaacattggctagcatgtggatgacctctgtttccttacaggctctgaagcccttcc

SEQ ID NO: 893 - RNA, 174 nt, synthetic construct
  source 1..174: mol_type = other RNA
agattgtttcacatcaccagtgtatcctcagctcctaacactgtgtctggtacacattgtttgatggttttgatgtttcagattcgttatatttcacaaacacaaggcttgccagctgaatatcttctcagtgccggaacaaaaacaaccaggtttttcaacagagatcctaat

SEQ ID NO: 894 - RNA, 174 nt, synthetic construct
  source 1..174: mol_type = other RNA
agcaagtccgcggtaagcgctgacgcatgcgcatagctaaccgcacccggttcagctcgcctttcttggccagaggcgccggttggactcacgggcggggcatgatggtggtgggtacgggcacctcgctggcgctctcctccctcctgtccctgctgctctttgctgggatgc

SEQ ID NO: 895 - RNA, 174 nt, synthetic construct
  source 1..174: mol_type = other RNA
agcacacacacatctgcacctcaaccacagactacacttgctgaactggctcctggggccatgaggctgtcactgccactgctgctgctgctgctgggagcctgggccatcccagggggcctcggggacagggcgccactcacagccacagccccacaactggatgatgaggag

SEQ ID NO: 896 - RNA, 174 nt, synthetic construct
  source 1..174: mol_type = other RNA
agcacgtcctgttttcgttggccgcgctgggatggccgccacagctgtaggtgctgctagtgtttagcgctggtctttgccgggcgttgagggcagctcagcctccttgtttgtccggttcgcctgtgcgtggtactcaagggcaccagtattcccgcggtcggcagcatgggt

SEQ ID NO: 897 - RNA, 174 nt, synthetic construct
  source 1..174: mol_type = other RNA
agcatggtggttgataaccgaagggcaaaagcatcacttatttagtgtgtgttatagaaattttttagacaaccttactagctaacccaggtgaccctttacggatttctttcaaagccaatttgaataaacaactcttccctctcaaatgggcaagagtaactcttcagcacc

SEQ ID NO: 898 - RNA, 174 nt, synthetic construct
  source 1..174: mol_type = other RNA
agccaattctgaccgtgtcaacgaatcatccacgcacctgcagctctgctgagagagtgcaagccgtgggggttttgagctcatcttcatcattcatatgaggaaataagtggtaaaatccttggaaatacaatgagactcatcagaaacatttacatattttgtagtattgtt

SEQ ID NO: 899 - RNA, 174 nt, synthetic construct
  source 1..174: mol_type = other RNA
agccagggagagggtgtgagggcagatctgggggtgcccagatggaaggaggcaggcatgggggacacccaaggccccctggcagcaccatgaactaagcaggacacctggaggggaagaactgtggggacctggaggcctccaacgactccttcctgcttcctggacaggact

SEQ ID NO: 900 - RNA, 174 nt, synthetic construct
  source 1..174: mol_type = other RNA
agcccaagatttctagggcattggccgcgctgctgggtgatccctccgggctcaagttgcaagggggcgggccgggccggaggtggagtctcccgccaattgaagcctccgctataaattgaactccctgcactgctgaagcccagatgcctcgccaggccacgtcgcggttgg

SEQ ID NO: 901 - RNA, 174 nt, synthetic construct
  source 1..174: mol_type = other RNA
agccctgcattccttacccttggttggattcttcccgggctgggagaaatgaccgcttctatgaggagaccatgtgccgaggtcgtgtgctaggaagccagttgctgtgagaaatgaccagtgtcatgtctgtctttcagccaccctacatcatgtagcagttcttctgagatc

SEQ ID NO: 902 - RNA, 174 nt, synthetic construct
  source 1..174: mol_type = other RNA
agccctttgtctgaaggtgctgcgggatgccgttccttcgcgcgtgaggctgcggctctgacgccccataggctccttcaatttccgtgatcctcggagtccccaggagaccaggtgatggcagcagccagactcctgccagtgccggcaggaccccaggccaagctgaccttc

SEQ ID NO: 903 - RNA, 174 nt, synthetic construct
  source 1..174: mol_type = other RNA
agccgggattgggcagagggcggggcggcggagggattgcggcggcccgcagcgggataaccttgaggctgaggcagtggctccttgcacagcagctgcacgcgccgtggctccggatctcttcgtctttgcagcgtagcccgagtcggtcagcgccggaggacctcagcagcc

SEQ ID NO: 904 - RNA, 174 nt, synthetic construct
  source 1..174: mol_type = other RNA
agcctgcctgtctgcatggtccgcctagaggtttgagcagctgggcatggaagaagcgagccacacccccatcgcatgccctatgaacgggataagggaactttttcacttcaccactatgcctgactaattttttaattaaaaaaaatttttttgtagaaacagagtttcacc

SEQ ID NO: 905 - RNA, 174 nt, synthetic construct
  source 1..174: mol_type = other RNA
agcctttttcccagcttccttgcaccatggacagctcccattaagccacctctccatcctggggccaggactcttatgccccattcctgtcaaattgagatttcatccaccattctccaaggacagtgaagttataccctagttccagtgttgggatcagtggcccctctggac

SEQ ID NO: 906 - RNA, 174 nt, synthetic construct
  source 1..174: mol_type = other RNA
agcggctgcagcatccagccagcttggatgtctggcctgtgagcctggggaaactattattaataatatttactgttgataatattggggaaaacagcccttaactctgaggtttctgctgtgctcctttccaaaacagacttccaggactctgaagaaacagttacaagcagg

SEQ ID NO: 907 - RNA, 174 nt, synthetic construct
  source 1..174: mol_type = other RNA
agctagtccactaggtgctaatcaaatgctgtgttacaacactgtgaggttttcccagttataagtgtcactattagggttttttttaattgcaaagccaaataaggctgtcaattgcatcatcttaccttatttcttcagattaagtactgtttatagtgggatttttggtgg

SEQ ID NO: 908 - RNA, 174 nt, synthetic construct
  source 1..174: mol_type = other RNA
agctcctgaggtgtagacgccaactctctctagctcgctagtgggttgcaggaggtgcttacgcatgtttgtttctttgctgccgtcttccagttgctttatctgttcacttgtgccctgactttcaactctgtctccttcctcttcctacagtactcccctgccctcaacaag

SEQ ID NO: 909 - RNA, 174 nt, synthetic construct
  source 1..174: mol_type = other RNA
agctgctgcggcaccagggctccaagactggccgttcagactgctaggtttagcttcaggggcagcccagggcagtgttgctgcatattgcatggatgaaaggctgaaggctgcctcctcttgcaggctggcttctgagattgcaccttcttctcctgctactcctccaaatct

SEQ ID NO: 910 - RNA, 174 nt, synthetic construct
  source 1..174: mol_type = other RNA
agcttcgacggccgccattttctttctttcttagctgttagctgagaggaagtctctgaacaggcggcagcggctcttatagtgcaaccatggcagactattcaacagtgcctcccccctcttctggctcagctggtggcggtggtggcggcggtggtggtggaggagttaacg

SEQ ID NO: 911 - RNA, 174 nt, synthetic construct
  source 1..174: mol_type = other RNA
aggaaaaaacctccaagagagctagggttcctctcagagaggaaagacaggtccttaggtcctcaccctcccgtctccttgcccttgcagttctgggaactggacagattggacaactataacgacacctccctggtggaaaatcatctctgccctgccacagaggggcccctc

SEQ ID NO: 912 - RNA, 174 nt, synthetic construct
  source 1..174: mol_type = other RNA
aggaagcggaggaaggtgaagtaggaccgaattcctgtgccgaagaggcctgcagtgggagagcaggatgggggctccggaggtggcgcccaggctctgagctaccctaggtctgcagactagcgggcattggccagagacatggcccagccactggccttcatcctcgatgtc

SEQ ID NO: 913 - RNA, 174 nt, synthetic construct
  source 1..174: mol_type = other RNA
aggaaggtgatgcttaagctgagctctgaggaatgatgaagaatgagctcggcgaagggggtgctggtgtttgatgcagggctcagagatggcctgatatgaaggagtcacgcctcccgcctcccggagctgcccagtggctgccttgtccttcaagtgcaggagctggttcaa

SEQ ID NO: 914 - RNA, 174 nt, synthetic construct
  source 1..174: mol_type = other RNA
aggaggaagggtcactgctgtctccggaagctcttggctgcaaagagagaggatcccgggtatctccctccttacaaccaccgccacctcctagtgccttagaagccactgacagcccccagggcaggtgagccctgcatctggaataaggatccagaggtctcgttcaggacc

SEQ ID NO: 915 - RNA, 174 nt, synthetic construct
  source 1..174: mol_type = other RNA
aggcactgtgccaagtattttgcttcgatgatttcacgtcatcttcaaaacaacctcatgagggctgggtcagttagaacctaaacaaactagagacctggttgcaacccctcaggctctgctgatgctgtccccctttgttcctgcagcgtggaccctgccagcagccaggcc

SEQ ID NO: 916 - RNA, 174 nt, synthetic construct
  source 1..174: mol_type = other RNA
aggccacagtaccctattcacgctctgtgcttgtgccaaggtttcaagtgatcctcccgcctcagcctgcccaggtgctgagattacatgtatgagccactgcacctggaaaggagccagaaatgtgaagtgctagctgaaggatgagcagcagctagccaggcaaagggggca

SEQ ID NO: 917 - RNA, 174 nt, synthetic construct
  source 1..174: mol_type = other RNA
aggccgcggcccagctgaccctcggggctcccccggcagcggacagggaagggttaaaggcccccggctccctgccccctgccctggggaacccctggccctgtggggacatgaactagggacaaattcccagctgacggggaccacaacctggattccctgcccaccctggcc

SEQ ID NO: 918 - RNA, 174 nt, synthetic construct
  source 1..174: mol_type = other RNA
aggcgcgggccctggcaggtcctttctcgaggcagggggcacggtagcacagggagcttctctttgtgggcgggcgcgaggcccgctagggggttatactggggaacgtgcctgcgcgtgcttggatagttcatttaaagcccccatccctgcaaggtggtgctttctaccaat

SEQ ID NO: 919 - RNA, 174 nt, synthetic construct
  source 1..174: mol_type = other RNA
agggaggaggaaggatgggcggtgttggcgtagccgcagggaggtgactgaagcgagcctggcctcttgcatcctccgcctgtgtacctccctcccctttttttccgccttctgccagcagaagcagcagccgcagcacctgagccgctactgccgctcactcaggacaacgct

SEQ ID NO: 920 - RNA, 174 nt, synthetic construct
  source 1..174: mol_type = other RNA
aggggcactgctctgtccgagtgctgcccttggggcgaggcgggcatgtggctctacaaggtggagtccaggcggccaaagtttggaaaggactttccttatcccagttgattgtgcagaatacactgcctgtcgcttgtcttctattcaccatggcttcttctgatatccagg

SEQ ID NO: 921 - RNA, 174 nt, synthetic construct
  source 1..174: mol_type = other RNA
agggggacactatttctggtactcccaggaggctgcgggtcgatgctcgtgccagcctgggacccaggcagcacggtttctctcccaaattgtgccagagaacacgcacgtcctggttttcattgttccccgcctcctgcgactcgtttgtggttaaaattataagacctaatt

SEQ ID NO: 922 - RNA, 174 nt, synthetic construct
  source 1..174: mol_type = other RNA
agggtgtcccaagccccttgggtcgcgtatctggctggatccagcctctccgcatcttgatcttttcccctcttctaggaggcatccctacaccctatgactacaggcctgattctcttctttcagtcagggcgacccttgggcgctggagtacgcttgggactggggctgcga

SEQ ID NO: 923 - RNA, 174 nt, synthetic construct
  source 1..174: mol_type = other RNA
agtaggacaatatgagactctggggcagtgaaagacttaccaggattccttctggaactgactcgtcagctcattcatgtcttacccagtctttaaacagtatttcatgataatggtctgcttttaattgctgggctttaccttaccctttttgtgattgcaggtcctacaggt

SEQ ID NO: 924 - RNA, 174 nt, synthetic construct
  source 1..174: mol_type = other RNA
agtaggagtggagagcgtgcgtgagtgagtgtgtgtgtgtgtgtgtgtgtgtgtgcatgcgtgtgtgaagaatgcacactatctcctgttggtaagtgtgtgcttactccctgaccagatgctgcggtgcacggggcagccaccatctctgcatgcatgtctgtgatgtcttcc

SEQ ID NO: 925 - RNA, 174 nt, synthetic construct
  source 1..174: mol_type = other RNA
agtatgcaggtcgctgcagggacccgaggcgacacgcgcctgcaggaggtggcactcctgccgcagctcttcgatctgcttgtccttggccagcggcgcgctcgcctgctccgacaggtcccgagcgcgctggcgggcaaagacttggcacagctccaggccggcgcaactctc

SEQ ID NO: 926 - RNA, 174 nt, synthetic construct
  source 1..174: mol_type = other RNA
agtcacttctgttcatttttaatgaaaacctattgctgttattttctattatgagttaacggtgatgtgtgttttttaaattttgtatacttgctctcaccctaaaatataccttaagagacttttcccctgtttttctttctgctttccaagactccaggaaaaacagcttcc

SEQ ID NO: 927 - RNA, 174 nt, synthetic construct
  source 1..174: mol_type = other RNA
agtcatccccaaaacgaggggatatcagcttaccgaggccgcaggttttcctagtccctacctcatagatatgtaggacatccccgggcccggaatgcggctctctgaccctctctgtgccctcccccgccccccgaaccaggcttggcgggcggaggcgccagcggatgtctc

SEQ ID NO: 928 - RNA, 174 nt, synthetic construct
  source 1..174: mol_type = other RNA
agtccgtggatctcacaaaaatgtttgctgacccttgacattgacaaactgctgacagctcagatgatccatgattggaaggatgtggtcatcaccaagatgtctttctttctccggttcccagttttccagacctgaagtgttttccaatcaaagcgaagagacgatctgtgg

SEQ ID NO: 929 - RNA, 174 nt, synthetic construct
  source 1..174: mol_type = other RNA
agtgccgccactggaaccaggagatgcggcgcaggagctgtcgctgtgtttgctttaacctgagtcttgttccttattgtggttcctgctgtggttttgatcatgttgttaccctcggacgtagcccggcttgtattgggttacttacagcaagaaaacctcatttctacctgc

SEQ ID NO: 930 - RNA, 174 nt, synthetic construct
  source 1..174: mol_type = other RNA
agtgtcctggttactgcagcggcagcaacagcaggtcctactatcgcctccctctagtctctgcttctctggatccctgaggagggcagaaggaagaaaacagcccaaagatgagagtgattcgcgtgggtacccgcaagagccagcttgctcgcatacagacggacagtgtgg

SEQ ID NO: 931 - RNA, 174 nt, synthetic construct
  source 1..174: mol_type = other RNA
agttcacccaatggacctgcctactgcagcgtaggcctcgcctcaacggcaggagagcaggcggctgcggttgctgcagccttcagtctccacccggactacgccatgttggggtttgtgggtcgggtggccgctgctccggcctccggggccttgcggagactcaccccttca

SEQ ID NO: 932 - RNA, 174 nt, synthetic construct
  source 1..174: mol_type = other RNA
agttctcaggctcacattcccaccacccacctctgagcccagccctccctagcatcaccacttccatcccattcctcagccaagagccaggaatcctgattccagatcccacgcttccctgcctccctcaggtcccagctcttgctcctgcctgtttgcctggaaatggccacg

SEQ ID NO: 933 - RNA, 174 nt, synthetic construct
  source 1..174: mol_type = other RNA
agttgccctgtcagtgcaggtggaggccccggcggggcaaagtggcaggaacctcttaaagggcgagagcggcgcggagccagaacgcggtcggcccggtccccgccgcacccagcccagcaacatcatgacaacagagaagagtttagtgactgaggccgaaaattcacagca

SEQ ID NO: 934 - RNA, 174 nt, synthetic construct
  source 1..174: mol_type = other RNA
agtttgcttggagctcctggggcctaacaaaaagaaacctgccatgctgctcttcctcctctctgcactggtcctgctcacacagcccctgggctacctggaagcagaaatgaagacctactcccacagaacaatgcccagtgcttgcaccctggtcatgtgtagctcagtgga

SEQ ID NO: 935 - RNA, 174 nt, synthetic construct
  source 1..174: mol_type = other RNA
ataaaccgacgtttagccagaccatcttgattcaaaacatctatcgtaatccccaaaacagtgcacagacggctgacggctcacactaccattgccctcttgaacatttaccgtaaccctcaaaactcttcccagtctgctgacggtttgcgctgtgccgtgagcgatgtggag

SEQ ID NO: 936 - RNA, 174 nt, synthetic construct
  source 1..174: mol_type = other RNA
ataggccccgcccctgtatcccaagaccctgcctcctcttgcggtggggggaaagcggcctcttactctaggcctttcggtttgcgcgagcgggcaggaaagcgtgcgtgcggctaagagagtgggcgctctcgcggccgctgacgatggaagaactggagcaaggcctgttga

SEQ ID NO: 937 - RNA, 174 nt, synthetic construct
  source 1..174: mol_type = other RNA
atcagcccaaaggtaggctcaggctccgacggtggccggcgggggtcacgaggcttcgtagtggaggaacgggtttggcgtgtgggacgcagctgcctctgtactggggagtcacggagtggccgggctccagggacatggcggcggcctctgcggtgtcggtgctgctggtgg

SEQ ID NO: 938 - RNA, 174 nt, synthetic construct
  source 1..174: mol_type = other RNA
atccaggtctctgtgctccacacttgtctttcgtgctccatgtttgaagaaattaatattgtggaagaacagttttaaggcttagaggaacttgagttaggatccgtacttggcagatgaggaaattgattctcatggatgtaaattcactgtttgaggccacaacagggcatc

SEQ ID NO: 939 - RNA, 174 nt, synthetic construct
  source 1..174: mol_type = other RNA
atccatttgttctcaagaggtagcaagaaacagtatccacagtggactccggggctcctacagacttggcacagcttcctacagtcttgaaacagccctgttgttctgtcatggccagtgggcagtttgtgaacaaactgcaagaggaagtgatctgccccatctgcctggaca

SEQ ID NO: 940 - RNA, 174 nt, synthetic construct
  source 1..174: mol_type = other RNA
atcccagcagactgtgcagtggggcaaggatttcatgagcatcctcctctaaacgcgtgtcaagacaaaagatgcttcagctttggaaacttgttctcctgtgcggcgtgctcactgggacctcagagtctcttcttgacaatcttggcaatgacctaagcaatgtcgtggata

SEQ ID NO: 941 - RNA, 174 nt, synthetic construct
  source 1..174: mol_type = other RNA
atcccagccgccagaattcgaggtctgcggcggctttcaaaacttgacaactttcctttccaggaggaccccgttctggagcgttatttcaaaggccacaaagctgcgatcacctccttggacctcagccccaacggcaagcaacttgctactgcttcttgggatacctttctc

SEQ ID NO: 942 - RNA, 174 nt, synthetic construct
  source 1..174: mol_type = other RNA
atccggcgcggtgtttagactccactgatgtcgtggcgctttaggggaagaagttggtgtttcgctgggccctggtactgaagacggggtccgggtcgcccctagctgtttcctactcacccaaagccccgcacccgccttttctctctctcctctggcaggatgaggcgtgca

SEQ ID NO: 943 - RNA, 174 nt, synthetic construct
  source 1..174: mol_type = other RNA
atccgggcaggataaaggcctgggtgaggcggctcacctaccctgctttctgcattcttctctccacatccctctctgtacttacagcccccaatggcccccaaaaagccagagcccaagaaggatgatgccaaggcagcccccaaggcagctccagctcccgcacctccccct

SEQ ID NO: 944 - RNA, 174 nt, synthetic construct
  source 1..174: mol_type = other RNA
atcctgatttaaacgtcagtagataagtgtattttattgatagaagatgttgaatttcttctgttcacttgcttttaaaaaagataaaccccacttgaaaaactgaggtgcttaaggagtaaaataatatgttcctggtggcatcctccagatcgtactgagaagcactccaca

SEQ ID NO: 945 - RNA, 174 nt, synthetic construct
  source 1..174: mol_type = other RNA
atcgctacgcccacttggtggcctataaaggaagcgggcgaaccccggcagccctacacaacttggggcccctctcctctccagcccttctcctgtgtgcctgcctcctgccgccgccaccatgaccacctccatccgccagttcacctcctccagctccatcaagggctcctc

SEQ ID NO: 946 - RNA, 174 nt, synthetic construct
  source 1..174: mol_type = other RNA
atctagagaaacatctgtagcatcaatgagtcagacaagcggtggtgaggcaggctcgcctcctccagctgttgttgctgctggatttgcctctgaagcagggagtgtctgcattaaaaatgacctgtagttctctgcttcatagatgcttcttcagctccctcctcttcctcc

SEQ ID NO: 947 - RNA, 174 nt, synthetic construct
  source 1..174: mol_type = other RNA
atcttatccaggacgcttcattgcatttggtcttcatttctccttagtctcctccaggctgacatttcctcaatctttattggtcttccacagccctgacacttttggagataccagtcagcatttccaagttcgttctgtgagactgtagtgtcaggacaaagcaacaacaaa

SEQ ID NO: 948 - RNA, 174 nt, synthetic construct
  source 1..174: mol_type = other RNA
atctttttataaaaaacccagtctttgctgaccagacaaagcataccagatctcaccagagagtcctaggggactacagaaggaaaaagacaagaggcagtaggatatctgtgtgtcctcccgctgaccacacttcctttagtgacccgattgcctcctcaagtcgcagacact

SEQ ID NO: 949 - RNA, 174 nt, synthetic construct
  source 1..174: mol_type = other RNA
atgaaccacacaatggtcacagagtttgtcctcctgggcctttctgatgatcctgaccttcagattgtgatttttctctttttatttatcacgtatatattaagtgttactggaaacctgactatcatcaccctaacctttgtggactcccatctgcagacacctatgtatttc

SEQ ID NO: 950 - RNA, 174 nt, synthetic construct
  source 1..174: mol_type = other RNA
atgacagagaaattccttttcctttatctttccctccttcccatgcccctactctcacaggcacagtggaatgaaaattcccttgtcagtttttccaaaataattgcttcgggaaaccatctaagcaactgttggatctgccacaacttcatcaccaggtcctcatcttaccaa

SEQ ID NO: 951 - RNA, 174 nt, synthetic construct
  source 1..174: mol_type = other RNA
atgagaaattccacagcagtaacagactttattcttcttggattgacaagtgacccacagtggcaggttgtacttttcatatttcttcttgttacctacatgttaagtgtgactgggaacctgatcattatcaccctcaccctttcagatccccatctgcagactcccatgtat

SEQ ID NO: 952 - RNA, 174 nt, synthetic construct
  source 1..174: mol_type = other RNA
atgccccaaattcttatattcacatacctgaatatgttttacttctttccccctttgcagatcttggcagaaaacctcaccatggtcaccgaattcctgttgctgggtttttccagccttggtgaaattcagctggccctctttgtagtttttctttttctgtatctagtcatt

SEQ ID NO: 953 - RNA, 174 nt, synthetic construct
  source 1..174: mol_type = other RNA
atgccgatgcagctgctgcttacagattttattatcttttccatcagattcatcatcaacagcatggaagcgagaaaccaaacagctatttcaaaattccttctcctgggactgatagaggatccggaactgcagcccgtccttttcagcctgttcctgtccatgtacttggtc

SEQ ID NO: 954 - RNA, 174 nt, synthetic construct
  source 1..174: mol_type = other RNA
atgcggcgaggtcctgctgcgtgagccattgacgtgtttggagctggagacggcctgggtgctggcgaagcggaggccggagtaagaagactgttagaatgccctcggtaacacagaggctgagagatcctgacataaatccttgtttgtcggaatctgatgcttccaccagat

SEQ ID NO: 955 - RNA, 174 nt, synthetic construct
  source 1..174: mol_type = other RNA
atgcggctggccaaccagaccctgggtggtgactttttcctgttgggaatcttcagccagatctcacaccctggccgcctctgcttgcttatcttcagtatatttttgatggctgtgtcttggaatattacattgatacttctgatccacattgactcctctctgcatactccc

SEQ ID NO: 956 - RNA, 174 nt, synthetic construct
  source 1..174: mol_type = other RNA
atgctcttgatttgaatcggaggctgctgtgaaaagggatgcagcttctgctagccactgtgaacttctgaatctcactagggttgggtctgctttggggcactcagataaccccagtatttccaaaccagctttcccttttgcttcaggacatatcttacccaagcctgcact

SEQ ID NO: 957 - RNA, 174 nt, synthetic construct
  source 1..174: mol_type = other RNA
atgcttcttccatgattttttgaatctagactgggctgttctctgtgttaaaccaatcagttgcgaccttctcttaacagtgtgaagtgagggggtctctctccctccttctccttcctctgtgattcaccttcctttttaccctgccctgcggcggctccgccccttaccttc

SEQ ID NO: 958 - RNA, 174 nt, synthetic construct
  source 1..174: mol_type = other RNA
atggaagaggaaaatgcaacattgctgacagagtttgttctcacaggatttttatatcaaccacagtggaaaatacccctgttcctggcattcttggtaatatatctcatcaccatcatggggaatcttggtctgattgctgtcatctggaaagaccctcaccttcatatccca

SEQ ID NO: 959 - RNA, 174 nt, synthetic construct
  source 1..174: mol_type = other RNA
atggacaacccacaggctctgccactcttcctactcctggcctccttggtagggatcctcaccctcagagcctcttctggacttcagcaaaccaacttctcctctgccttctcttcagactcaaagagctcttcccaggggctgggtgtggaagttccctccatcaaacctccc

SEQ ID NO: 960 - RNA, 174 nt, synthetic construct
  source 1..174: mol_type = other RNA
atggacacagggaactggagccaggtagcagaattcatcatcttgggcttcccccatctccagggtgtccagatttatctcttcctcttgttgcttctcatttacctcatgactgtgttgggaaacctgctgatattcctggtggtctgcctggactcccggcttcacacaccc

SEQ ID NO: 961 - RNA, 174 nt, synthetic construct
  source 1..174: mol_type = other RNA
atggagccccaaaatacctccactgtgactaactttcagctgttaggattccagaaccttcttgaatggcaggccctgctctttgtcattttcctgctcatctactgcctgaccattatagggaatgttgtcatcatcaccgtggtgagccagggcctgcgactgcactcccct

SEQ ID NO: 962 - RNA, 174 nt, synthetic construct
  source 1..174: mol_type = other RNA
atggcaacggtgaacacagatgccacagataaagacatatccaagttcaaggtcaccttcactttggtggtctccggaatagagtgcatcactggcatccttgggagtggcttcatcacggccatctatggggctgagtgggccaggggcaaaacactccccactggtgaccgc

SEQ ID NO: 963 - RNA, 174 nt, synthetic construct
  source 1..174: mol_type = other RNA
atggcaagggagaattcgaccttcaactccgacttcatcctcctgggaatcttcaatcacagccccacccacaccttcctcttctttctggtcctggccatcttttcagtggccttcatgggaaactctgtcatggttctcctcatctacctggacacccagctccacaccccc

SEQ ID NO: 964 - RNA, 174 nt, synthetic construct
  source 1..174: mol_type = other RNA
atggcatgggagaatcagaccttcaactctgacttcatcctcctgggaatcttcaatcacagccccacccacaccttcctcttctttctggtcctggccatcttttcagtggccttcatgggaaactctgtcatggttctcctcatctacctggacacccagctccacaccccc

SEQ ID NO: 965 - RNA, 174 nt, synthetic construct
  source 1..174: mol_type = other RNA
atggctgaagaaaatcataccatgaaaaatgagtttatcctcacaggatttacagatcaccctgagctgaagactctgctgtttgtggtgttctttgccatctatctgatcaccgtggtggggaatattagtttggtggcactgatatttacacaccgtcggcttcacacacca

SEQ ID NO: 966 - RNA, 174 nt, synthetic construct
  source 1..174: mol_type = other RNA
atggggcctttgttcaccaccattcctggtgcccattctggtcccatgcgtcctctgcccaagaaacacgtagaacccatggcagtgcgacagctgcttcttggcaactccaccatgatcaggcacacttgtcccatgtctgtcccgttgagccggcaagtcaaggaagttgct

SEQ ID NO: 967 - RNA, 174 nt, synthetic construct
  source 1..174: mol_type = other RNA
atggtgactgaattcatttttctgggtctctctgattctcaggaactccagaccttcctatttatgttgttttttgtattctatggaggaatcgtgtttggaaaccttcttattgtcataacagtggtatctgactcccaccttcactctcccatgtacttcctgctagccaac

SEQ ID NO: 968 - RNA, 174 nt, synthetic construct
  source 1..174: mol_type = other RNA
atggtgagggagaatcagaccttcaactccgacttcatcctccttggaatcttcaatcacagcccaccacacacgttcctcttctttctggtcctgggcatctttttagtggccttcatgggaaactctgtcatggttctcctcatctacctggacacccagctccacaccccc

SEQ ID NO: 969 - RNA, 174 nt, synthetic construct
  source 1..174: mol_type = other RNA
atgtgcactgagggtgacacttctgagtgtgggggccctggctagggagtgggactggcaggcttgggtggggttcccaagctttaatcttcctaccccacagaatgttttctctgcccttcaggcagcctgagccgggcagggcccctgcctctgctacggcagcccccgatc

SEQ ID NO: 970 - RNA, 174 nt, synthetic construct
  source 1..174: mol_type = other RNA
atgttctcaatgacaacagaagcactcaataattttgcacttggatgtaccaacttgttaatgactatgataccacaaattgatctgaagcaaattttcctttgtcctaattgcagactatacatgatccctgttggagctttcatcttttccttgggaaacatgcaaaaccaa

SEQ ID NO: 971 - RNA, 174 nt, synthetic construct
  source 1..174: mol_type = other RNA
attcagccccgtgctcagcagacatcagggatcaccgactctgtgccaggagctgttcttgatgctgggaacgcaggggtggacaaaacagagaaagccctgccctcagtgagaaatatgctgtcatgtaaattgctttttcccctatagaatgccagcagttactctgcagag

SEQ ID NO: 972 - RNA, 174 nt, synthetic construct
  source 1..174: mol_type = other RNA
attcttcccctctctacaaccctctctcctcagcgcttcttctttcttggtttgatcctgactgctgtcatggcgtgccctctggagaaggccctggatgtgatggtgtccaccttccacaagtactcgggcaaagagggtgacaagttcaagctcaacaagtcagaactaaag

SEQ ID NO: 973 - RNA, 174 nt, synthetic construct
  source 1..174: mol_type = other RNA
attggctgagcccggctgtcagtcctttcgcgcctcggcggcgcggcatagcccggctcggcctgtaaagcagtctcaagcctgccgcagggagaagatggcggtcgccgtgagaactttgcaggaacagctggaaaaggccaaagagagtcttaagaacgtggatgagaacat

SEQ ID NO: 974 - RNA, 174 nt, synthetic construct
  source 1..174: mol_type = other RNA
attgggctgagtcggagacttcctttcctgattggccgtgttgtacggcggcttctcgcgcagctgatgacctggaagtgatgcctaaagctgtggaccgcgtgggctcgcctccctgggactaggtttcagcggccgctgcgatgaccaaaataaaggcagatcccgacgggc

SEQ ID NO: 975 - RNA, 174 nt, synthetic construct
  source 1..174: mol_type = other RNA
atttctttataaaccacaactctgggcccgcaatggcagtccactgccttgctgcagtcacagaatggaaatctgcagaggcctccgcagtcacctaatcactctcctcctcttcctgttccattcagagacgatctgccgaccctctgggagaaaatccagcaagatgcaagc

SEQ ID NO: 976 - RNA, 174 nt, synthetic construct
  source 1..174: mol_type = other RNA
caaaaggcttccctctgtgtgttgcagtcctgtggcattatgcatgccccctcccagtgaccccaggctttttatggctgtgagacacgttaaaatttcaggggtaagacgtgaccttttgaggtgactataactgaagattgctttacagaagccaaaaaaggtttttgagtc

SEQ ID NO: 977 - RNA, 174 nt, synthetic construct
  source 1..174: mol_type = other RNA
caacagaagccaagaaggaagccgtctatcttgtggcgatcatgtataagctggcctcctgctgtttgcttttcataggattcttaaatcctctcttatctcttcctctccttgactccagggaaatatcctttcaactctcagcacctcatgaagacgcgcgcttaactccgg

SEQ ID NO: 978 - RNA, 174 nt, synthetic construct
  source 1..174: mol_type = other RNA
caactggaggcaaagagggttgctcaacgccccgcctcattggaaaaccaaatcagatctgggacctatatagcgtggcggaggcggggcgatgattgtcgcgctcgcacccactgcagctgcgcacagtcgcatttctttccccgcccctgagaccctgcagcaccatctgtc

SEQ ID NO: 979 - RNA, 174 nt, synthetic construct
  source 1..174: mol_type = other RNA
caattgtgcatgtcggactcggcgcccagcgcccaagcgctaacccgctgaaagtttctcagcgaaatctcagggacgatctggaccccgctgagaggaactgcttttgagtgagatggtcccagaggcctggaggagcggactgcaagccccgcccaacacggactggcgttt

SEQ ID NO: 980 - RNA, 174 nt, synthetic construct
  source 1..174: mol_type = other RNA
cacagccatcttgggatctgggcaagtgagcgagctccttcctcaccgggctgactagcctctcctttccctgtccccctccatcgctgctctgcaggaagccagcccccagggccagtcccggaggggctgatccgcatctacagcatgaggttctgcccctattctcacagg

SEQ ID NO: 981 - RNA, 174 nt, synthetic construct
  source 1..174: mol_type = other RNA
cacatgcgcaccgcagcgggtcgcgcgccctaaggagtggcactttttaaaagtgcagccggagaccagcctacagccgcctgcatctgtatccagcgccaggtcccgccagtcccagctgcgcgcgccccccagtcccgcacccgttcggcccaggctaagttagccctcacc

SEQ ID NO: 982 - RNA, 174 nt, synthetic construct
  source 1..174: mol_type = other RNA
caccattgaatcccagtcctaacagaagtactgcgaatcttgtggcctcattctgaacaaaagggattagagaagaaaaatctcttgatataaggcttgaaagcaagggcaggcaatcttggttgtgaatattttctgatttttccagaaatcaagcagaagattgagctgctg

SEQ ID NO: 983 - RNA, 174 nt, synthetic construct
  source 1..174: mol_type = other RNA
caccctacagcagttcaggctgtgtggttcgcaggaagcatacactggctttttgattcttgctagttcccagctcacagtttgggaggatccaacaccaacctttacgtgaagtggaggcccaaggacagtgaggagctgggtggtcccagcctggagctgtgccagcctgac

SEQ ID NO: 984 - RNA, 174 nt, synthetic construct
  source 1..174: mol_type = other RNA
caccctcgcgatctgtcaagtctgtccccaggggaggtccccctttcgggaggaagtttttaaggggatttctcaaaatcacccccgcgcttccttcactccttccttagagccggaggtcggtgagggcccgcggaatcatctatctcgcccccgtcgcagcgcgcagggacc

SEQ ID NO: 985 - RNA, 174 nt, synthetic construct
  source 1..174: mol_type = other RNA
cacccttctcctcctccgcccagtactcgtggccagggtcgtatcagttctccgtcaacttgcttggggccttggacgagcctcctggcgcttcctgtcagtggcgaaaagctgctttgctccccctgtggatgtaaccccttagctggcattttgcatctcaattggcttgtg

SEQ ID NO: 986 - RNA, 174 nt, synthetic construct
  source 1..174: mol_type = other RNA
caccgcaggctcctgtgccttgggcttgagctttgtggcagttaatggcttttctgcacgtatctctggtgtttacttgagaagcctggctgtgtccttgctgtaggagccggagtagctcagagtgatcttgtctgaggaaaggccagccccacttggggttaataaaccgcg

SEQ ID NO: 987 - RNA, 174 nt, synthetic construct
  source 1..174: mol_type = other RNA
cacgtgtcagtgcctgaggcagagactgcgagaaaaaaacgcgcttcattccttcttccaccgccatactgtattttatactaaatctcatttttattccaacattttactcccgctcgatatagcccttggcgaggtgcctggctccatagattaaagcaaggagagccaatc

SEQ ID NO: 988 - RNA, 174 nt, synthetic construct
  source 1..174: mol_type = other RNA
cacgttcttatgtaaccgagcccgggtaaagcagggctgcagaaagcagaaacggcgagcccggctcctgggagcaggtctcggcccccgcttggggccccggccgtgcggccggagggagcggccggatggagcggaggatgaaagccggatacttggaccagcaagtgccct

SEQ ID NO: 989 - RNA, 174 nt, synthetic construct
  source 1..174: mol_type = other RNA
cactgacgggcacttgcaccgtgtggacagactctccggttctggggaaatccagtccctgttactccattttggccagaaattcaagacatttcaggtggcagaataaattcaatccttgtttctccatcttatcgagtagtagaagttagttacattctctttgaactcatc

SEQ ID NO: 990 - RNA, 174 nt, synthetic construct
  source 1..174: mol_type = other RNA
cactgtctgaaacagtcgcgtaaggggtcgccactgggacactgtgaaccaggagtgagtcggagctgccgcgctgcccaggccatggactgtgaggtcaacaacggttccagcctcagggatgagtgcatcacaaacctactggtgtttggcttcctccaaagctgttctgac

SEQ ID NO: 991 - RNA, 174 nt, synthetic construct
  source 1..174: mol_type = other RNA
cactgttggtaaagcccagcccttcccaacctgcaagctcaccttccaggactgggcccagcccatgctctccatatataagctgctgccccgagcctgattcctagtcctgcttctcttccctctctcctccagcctctcacactctcctcagctctctcatctcctggaacc

SEQ ID NO: 992 - RNA, 174 nt, synthetic construct; identical to SEQ ID NO: 592
  source 1..174: mol_type = other RNA

SEQ ID NO: 993 - RNA, 174 nt, synthetic construct
  source 1..174: mol_type = other RNA
cagaggagcacgaggatcgtgggagctaagaatagcaggacccagtgctccataaaggataatagtttccagtacactatccctcatgatgactccttaagtggttcatcgtctgcatcttcgtgtgaaccagtgagtgattttccagcatctttccgaaaatctacctactgg

SEQ ID NO: 994 - RNA, 174 nt, synthetic construct
  source 1..174: mol_type = other RNA
cagcatgttcgagctcattcctctccagcttctctgcagttgggagctgtttctcctgggacactgacccccactggagtagtctctggcccagcagctacacccacagctcagcatcttcgacagtcttcttttgagatacctgatgatgtacctctgccagcaggttgggag

SEQ ID NO: 995 - RNA, 174 nt, synthetic construct
  source 1..174: mol_type = other RNA
cagcccgcgtctctctgacagcagcaggggctgggtttaagcagcggctgctttgcctggggagcacccgtaaatggactttggtctcaatgctttgactctttgccgtggttttggatgttggaataccggcggtgatctgtcttttataaactcacctgatttaaaggaaag

SEQ ID NO: 996 - RNA, 174 nt, synthetic construct
  source 1..174: mol_type = other RNA
cagccctgacgcttccttggggccacttccttctttttttcctagcaacggcgggtagcgtttttgacatcccgggaggctgtgccgccggcctgagcccagagtttcgcggcctccgcgatggcagaggtggaggaaaccttaaagaggatccagagtcataaaggggttatt

SEQ ID NO: 997 - RNA, 174 nt, synthetic construct
  source 1..174: mol_type = other RNA
cagctcattctggatgaatgaatgattacactaagtgtcctccacattcctctgtgggctcacttcatggactcactttgcgtgcttgttaaatgtgctgtgttgctcccaagaccatgtaaagcctactgaccactaacctccctcacagcagaaactagacgtcaggttaaa

SEQ ID NO: 998 - RNA, 174 nt, synthetic construct
  source 1..174: mol_type = other RNA
caggccactctcctgtgcctgccagaagagacagagcttgaggagagcttgaggagagcaggaaagcagcctcccccgttgcccctctggatccactgcttaaatacggacgaggacagggccctgtctcctcagcttcaggcaccaccactgacctgggacagtgaatcgaca

SEQ ID NO: 999 - RNA, 174 nt, synthetic construct
  source 1..174: mol_type = other RNA
caggccggggttactgtggcgaccacgagagcagctttggcgctatggaggagcccggggttacccctcaaccgtatttggggctgctcctggaggagctacgcagggttgtggcagcactgcctgaaggttaggagtcggctttatgtgggacgagagaaaaagcttgctcta

SEQ ID NO: 1000 - RNA, 174 nt, synthetic construct
  source 1..174: mol_type = other RNA
caggcctccatctccaggtccctctccgaggcttcctcgctgccagctgagtcgtgggcacctgagggactacctaccactgctcccggctgtgccatcgccaccagctcccagcctcctgctcagacccgggacagcccctccatggcccccgagatggaccagttttacagg

SEQ ID NO: 1001 - RNA, 174 nt, synthetic construct
  source 1..174: mol_type = other RNA
caggtctgggctcttcagctgagcacttagtgtttgtacaggatgaggcagaagattcagggaatgatttcctctccagtgagagcacagacagtagcattccatggttcctccgggttcaggagttggcccatgacagtttgattgctgctactcgtgcacaactggcaaaga

SEQ ID NO: 1002 - RNA, 174 nt, synthetic construct
  source 1..174: mol_type = other RNA
cagtatgaggcaagcgcagggggacggggaccagcagctgtcgccgccgctctcaggctctgggaaccacccttctactttctgtctctaggaatttcactactctagggtgaagagggaacagaaatctttgccccctgactttggaaatctcgtttaaccttcaaactggcg

SEQ ID NO: 1003 - RNA, 174 nt, synthetic construct
  source 1..174: mol_type = other RNA
catatgggtgattggtacagtaggtttataaacagaagtttaaacttgtaagcttaagcttccgtttataaacagaagtttaaaattataggtcctgtttaacattcagctctgttaactcactcatctttttgtgtttttacactttgtcaagatttctttacatattcatca

SEQ ID NO: 1004 - RNA, 174 nt, synthetic construct
  source 1..174: mol_type = other RNA
catcgcgtcagtacttatggcgcctgccgggttgtggtgacgaaagcagttgccatggagttgctctgagtaaccctgaggcagtgggacgccaagactggagaggaagcgactgcggggagtatttccattttaaccggaaacaatccctgaacccacaggaatgaatgccta

SEQ ID NO: 1005 - RNA, 174 nt, synthetic construct
  source 1..174: mol_type = other RNA
catcggcgctttgccacttgtacccgagtttttgattctcaacatgtccgagactgctcctgccgctcccgctgccgcgcctcctgcggagaaggcccctgtaaagaagaaggcggccaaaaaggctgggggtacgcctcgtaaggcgtctggtcccccggtgtcagagctcat

SEQ ID NO: 1006 - RNA, 174 nt, synthetic construct
  source 1..174: mol_type = other RNA
catctccggccatactgccagccgcgttagccttgcctgaccgtcgcgctcggaaagaaacccccgcaactctaccacagaaaatcgagagccttggttacaaccgacttatcctgcaaattggtagaggaacggtggtacctgaacccttcagtactgagtcgtttactctgg

SEQ ID NO: 1007 - RNA, 174 nt, synthetic construct
  source 1..174: mol_type = other RNA
catttggggagaatgagggagaaaagaacgggcattccgagccaagagcactgcatgagcaaggagttgggaggttgcttacttgttgaacatatttgttgcgtatttgcatatttgctaaacaggttttcgtaacaccccagggcctgtaaggtttggtgtttccctttcaag

SEQ ID NO: 1008 - RNA, 174 nt, synthetic construct
  source 1..174: mol_type = other RNA
ccaaacaaacttgaagatctcacagacctaatagacacggcctttcctctctgcctctggctttatgtctctttcatcctcctctgcctttcccctgcccttgatcccttctgcaggtcttggctggtttcaggaaacgggtcccatcccatggactcccactctggggagcct

SEQ ID NO: 1009 - RNA, 174 nt, synthetic construct
  source 1..174: mol_type = other RNA
ccaagccagatcagcattgttctgaccctactaagtccaaaaccttttgaggccagaccttgtttcaactccaaagcctgctaggttccagcaccccccgcatccctcctcataccacccccttctcccccctatggaaaccgcttgcttatttttcaaacaggccaagtcatt

SEQ ID NO: 1010 - RNA, 174 nt, synthetic construct
  source 1..174: mol_type = other RNA
ccacctgtgccgccctgccttgttacctggaagcacagccttggggactgagcaggccctcactgtcactttaagaagggaatcagccactttgtgctcaccacctctggggaaggtgtgagaggagagaaggaagtggctgtttggctgctgacaacatgaagacttcctgcg

SEQ ID NO: 1011 - RNA, 174 nt, synthetic construct
  source 1..174: mol_type = other RNA
ccagggcgagtgacaggcgagccctatgctttacttccgagggcggtgtcagcaaagctagagtcagaggttccggttgagatcaagttgggagacacacccttgttcattctccttgagaagcagctattatcaacagaacattgacagaacctgtgtttggggaaaggactg

SEQ ID NO: 1012 - RNA, 174 nt, synthetic construct
  source 1..174: mol_type = other RNA
ccagggctggaatggggccgcccggctccccatggcagtgggtgacgctgctgctggggctgctgctccctcctgccgcccccttctggctcctcaatgtgctcttccccccgcacaccacgcccaaggctgagctcagtaaccacacacggcccgtcatcctcgtgcccggct

SEQ ID NO: 1013 - RNA, 174 nt, synthetic construct
  source 1..174: mol_type = other RNA
ccatgcactgagctggggacatgcaacaataacaggccatacaatgaaagtcgctgaagaagaatatgaattttgcctgcggatttgctaacactcgacaatcctaggaggtgagttccaacaaattggttcaaaaagaggggggataaacacgctggcccatgctgggcaagc

SEQ ID NO: 1014 - RNA, 174 nt, synthetic construct
  source 1..174: mol_type = other RNA
ccatgggttccccttcagcctgtccatacagagtgtgcattccctggcaggggctcctgctcacagcctcgcttttaaccttctggaacctgccaaacagtgcccagaccaatattgatgtcgtgccgttcaatgtcgcagaagggaaggaggtccttctagtagtccataatg

SEQ ID NO: 1015 - RNA, 174 nt, synthetic construct
  source 1..174: mol_type = other RNA
cccacatgcgctggatcagtccacggcttggggaaaggcatccagagaaggtgggagcggagagtttgaagtctttacaggcgggaagatggcggactggagctgaaagtgttgattgggaaacttgggtgattcttgtgtttatttacaatcctcttgacccaggcaggacac

SEQ ID NO: 1016 - RNA, 174 nt, synthetic construct
  source 1..174: mol_type = other RNA
cccagccctcgtcgccgccgccattttagctgttggttccggccgcaccgtgtgggctgtagtagcgggaggggtgggggtcctccagagttaagtggctgtcctcgactgtgcccatacagcagccagctttcttccttaataactgcccgttcgaagagtgcgaggatgtcc

SEQ ID NO: 1017 - RNA, 174 nt, synthetic construct
  source 1..174: mol_type = other RNA
cccccagccccctggtcccaccttgccttccgcccaccttcccacctgctgcagggagggccctcggctgagccttcagacacacttgcaccccatccgctcccctcctgaatttcttctgaccctcccttggcttcacagcacctgaaggccaggctgaggccccctgctctc

SEQ ID NO: 1018 - RNA, 174 nt, synthetic construct
  source 1..174: mol_type = other RNA
ccccggagtgcagtcaagttgaccaagaagcgggcactgtccatctcacctctgtcggatgccagcctggacctgcagacggttatccgcacctcacccagctccctcgtagctttcatcaactcgcgatgcacatctccaggaggctcctacggtcatctctccattggcacc

SEQ ID NO: 1019 - RNA, 174 nt, synthetic construct
  source 1..174: mol_type = other RNA
cccgccccaacccagcggttctgcgcatgcgcgggggccatattagcagcggttattcggtgagcggtggtggtttattcttccgtggagttaagggctccgtggacatctcaggtcttcagggtcttccatctggaactatataaagttcagaaaacatgtctcgaagatatg

SEQ ID NO: 1020 - RNA, 174 nt, synthetic construct
  source 1..174: mol_type = other RNA
ccctaccctatgctaaggggactcgtctccacctcgtaaaggaaactccccaagggaatccctgtcccctattttcctatccttctacccttccaagacagtcctagcctatagaactcctacctcccatcccctgaggtggtccccattcctccctcccttcctccccccgcc

SEQ ID NO: 1021 - RNA, 174 nt, synthetic construct
  source 1..174: mol_type = other RNA
ccctctttcagagtggtacatggaagacagcacaaagtggatccatactctgaaatgcagtaactctgatgcttgaatttgtctcccttcttgccagaaaggattctaataactcggtgtcaaagccaagacataaactcaaccccttctcttccaaaagcttcacgttacagc

SEQ ID NO: 1022 - RNA, 174 nt, synthetic construct
  source 1..174: mol_type = other RNA
ccgaggccgcctggcccttgtttactaaccctccctcaaacgtttcctgggtggctccccagggacggcagggctgggggcttctctccagggagctgctgctgaggcctgtgtctcccgtggctcctctgacaggtcccgcctgactccgctctggaaagtccttttgaagaa

SEQ ID NO: 1023 - RNA, 174 nt, synthetic construct
  source 1..174: mol_type = other RNA
ccgcctcctggcctcctggctgaggggaagctgagtgggccacggcccatgtgtcgcactcgcctcggctcccacacagccgcctctgctccagcaaggatgtggctcttccacactctgctctgcatagccagcctggccctgctggccgctttcaatgtggatgtggcccgg

SEQ ID NO: 1024 - RNA, 174 nt, synthetic construct
  source 1..174: mol_type = other RNA
ccgctccctggcgtgactcggcactgagagtcccgggagaagactcggcggtcgccacctcttctgtccaggcctcggccttcctgagcatctctccttcctctcccagatcgtcttctccttcagtttcaaagccagtggcgtcgcggccaccctgccgggctctctgtgagg

SEQ ID NO: 1025 - RNA, 174 nt, synthetic construct
  source 1..174: mol_type = other RNA
ccgctgctttggcggtgggcccagccgggagcagcctctttcgaaggccgccgtgacctcttcaagggcgtggagacgggaaggaaaaggccccggttggggttccagggcgccggtaacgttaaccggcgccttgcctgtcctctaaccgtcgctccctcctcccctagaaag

SEQ ID NO: 1026 - RNA, 174 nt, synthetic construct
  source 1..174: mol_type = other RNA
ccgctggtcttttactgccatcaatacactgttcttggtgcaaatacttcagcctctttattcaaagtatgttttatgtttttgccaaatatgatctctaattgaaagtttatttttggttttggatgaatctgcggagcttaagttgtgagaagaaagggggaacaagacaca

SEQ ID NO: 1027 - RNA, 174 nt, synthetic construct
  source 1..174: mol_type = other RNA
ccgggaacccctaccccatccccttattcagcacatgaaataaacaaggggcatccaaatcttgcggcaacgcccccgggacatgcatcgtcccctggactctctcaaaccccttatccctctggacagaatgcaggtccaaccacgctggtataccctcaaacccctcagaca

SEQ ID NO: 1028 - RNA, 174 nt, synthetic construct
  source 1..174: mol_type = other RNA
ccgggaggctgagactgcattgttgggatttgatgcactaatctcctgtctccgccgcctttccctctgttcggtctcttgccctccctcccttcgtctgtccttcctccgtgtgtttgtctatcctcctctgtccctcctctttcctctccttgctttctttggttttctgca

SEQ ID NO: 1029 - RNA, 174 nt, synthetic construct
  source 1..174: mol_type = other RNA
ccgtaaccgcctgttgccccctgtctcagagtccctcacgcgtcccctcccgtctttggctcgttggctgccgccgccggggcttcgccagccttcaagtcgagactactggccgaaggggcgtctgcggctctccgccgtccccagccctgcctctccctgggctctgcagcc

SEQ ID NO: 1030 - RNA, 174 nt, synthetic construct
  source 1..174: mol_type = other RNA
ccgtcggatgtgattattgttgctattgttaccgctccgcctggactgggtgcccggtcggaaagtcccgctccccgctcctcctcccaggcgcggaagcttcgcgccgcccgcctcgggggacacctcccgcgccatctcgggggcactggagataaggcctccctccctgac

SEQ ID NO: 1031 - RNA, 174 nt, synthetic construct
  source 1..174: mol_type = other RNA
ccgttcccctttcccctcccttccctatccccgacgaccggatcctgaggaggcagctgcggtggcagctgctgagttctcggtgaaggtatttcatttctcctgtcccctcccctccccaccccatctattaatattattcttttgaagattcttcgttgtcaagccgccaaa

SEQ ID NO: 1032 - RNA, 174 nt, synthetic construct
  source 1..174: mol_type = other RNA
cctcattccccatgaatgctgtgggaagtcctgaggggcaggagctgcaaaagctggggagtggagcctgggacaaccccgcctacagtggtcccccttccccacacgggacgctgagagtctgcaccatctccagcacggggcctctccagccccaacccaagaagcctgaag

SEQ ID NO: 1033 - RNA, 174 nt, synthetic construct
  source 1..174: mol_type = other RNA
cctcccccgccctcctggtccaatctccgatctgtttagtaagaaggcgcctgtgtctggcagagctggtgtgagacgagacaatcctgccccgccgccgggataatcaagagttttggccggacctttgagcatacaccgagagagtgaggagccagacgacaagcacacact

SEQ ID NO: 1034 - RNA, 174 nt, synthetic construct
  source 1..174: mol_type = other RNA
cctctccccccgggctccgcccaccccacgccgggaacccacgcgggccactacaagcccgccctttcctacgtctggtccagtcggtcttcctccggcccgggccctggcccagctagccggccatggaaggtaatggccccgctgctgtccactaccagccggccagccccc

SEQ ID NO: 1035 - RNA, 174 nt, synthetic construct
  source 1..174: mol_type = other RNA
cctctctccctcctccctcgctctctcccccttctctccccttcttcctcggtttcttccgtcctctctctccccctcctcctcccccgcctcctcctcctgcgctcccgccccctgccccctccccccgtgcctgcagacgcgcggatcgtccatgcgctcctcgcgggcaga

SEQ ID NO: 1036 - RNA, 174 nt, synthetic construct
  source 1..174: mol_type = other RNA
cctctctgctgagtcagagctctgcatatattttaagaaaaggcattgaggaactcaatcaaaccagtattcttttcacacaggtttcatcagtttcacccttttctgtgtgcggctgattttagaaagattgcttccttgtatggtagcgataagtttgatttgccctatggg

SEQ ID NO: 1037 - RNA, 174 nt, synthetic construct
  source 1..174: mol_type = other RNA
cctctcttccagggctgccgtccacactctcccggtcagagtcctgggaccacatggggacgctgccatggcttcttgccttcttcattctgggtctccaggcttgggatactcccaccatcgtctcccgcaaggagtggggggcaagaccgctcgcctgcagggccctgctga

SEQ ID NO: 1038 - RNA, 174 nt, synthetic construct
  source 1..174: mol_type = other RNA
cctctggactttgaggaagaacccacagcaggaggaagtcagcagggagtggctgtgtgaaacctgggaccacttctgccttcctacgtggcagtggctcagagttatttgagtgctgtcaaactgagctgattgctgccctagtattagatcagtccatagaaagtgggagca

SEQ ID NO: 1039 - RNA, 174 nt, synthetic construct
  source 1..174: mol_type = other RNA
cctgaagatgtagctcctactgttggattttcaaaaattaaccttagacaaggaaagtttgaagtcaccatctttgacttgggaggtggaataagaattcggggaatctggaagaattactatgctgaatcctatggggtaatatttgttgtggattccagtgatgaagagaga

SEQ ID NO: 1040 - RNA, 174 nt, synthetic construct
  source 1..174: mol_type = other RNA
cctgcttttggttcttacagtagtcggcgtaggccttaggtgggttcgtgcgccttctacctcgctgtttcggttttcctggctcctcggcccttttctcccctgttgcagctgggagcggacgaagcgcgaagctgggattttttactgtctcctgaagaatttaacacaaac

SEQ ID NO: 1041 - RNA, 174 nt, synthetic construct
  source 1..174: mol_type = other RNA
cctggatgtagctgagaggctgggagaagagacgaccgctggagaccgagcggcgtggggaagacctaggggggtgggtgggggaagcagacaggagaacactcgaaatcaagcgctttacagattattttattttgtatagagaacacgtagcgactccgaagatcagcccca

SEQ ID NO: 1042 - RNA, 174 nt, synthetic construct
  source 1..174: mol_type = other RNA
cctgtcaaagccttcttaattatgtctgagaaaagtactaaaataggtgccattttaaattcccagacaaggaaaaaccaaggattagaaattaagtagcttgcccaaggccacacatcagatcctgattgagtcaatgctttgcattctcagtcctctgcataaagctgagag

SEQ ID NO: 1043 - RNA, 174 nt, synthetic construct
  source 1..174: mol_type = other RNA
ccttcattccacagacacacacagcctctctgcccacctctgcttcctctaggaacacaggagttccagatcacatcgagttcaccatgaattcactcagtgaagccaacaccaagttcatgttcgatctgttccaacagttcagaaaatcaaaagagaacaacatcttctatt

SEQ ID NO: 1044 - RNA, 174 nt, synthetic construct
  source 1..174: mol_type = other RNA
ccttcatttggggtttcggttcccccccttccccttccccggggtctgggggtgacattgcaccgcgcccctcgtggggtcgcgttgccaccccacgcggactccccagctcgcgcgcccctcccatttgcctgtcctggtcaggcccccaccccccttcccacctgaccagcc

SEQ ID NO: 1045 - RNA, 174 nt, synthetic construct
  source 1..174: mol_type = other RNA
cgacttcggtctgcgccggaagtgcatgagctgccgatgtggtgcttagtgattgcggtttcggtcgctctcccgtgtttcccgggctgggtatttgcctcgcaccatggcgcccaagggcaaagtgggcacgagagggaagaagcagatatttgaagagaacagagagactct

SEQ ID NO: 1046 - RNA, 174 nt, synthetic construct
  source 1..174: mol_type = other RNA
cgagggctcctgctggtactgtgttcgctgctgcacagcaaggccctgccacccaccttcaggccatgcagccatgttccgggagccctaattgcacagaagcccatggggagctccagactggcagccctgctcctgcctctcctcctcatagtcatcgacctctctgactct

SEQ ID NO: 1047 - RNA, 174 nt, synthetic construct
  source 1..174: mol_type = other RNA
cgcaccgggtccgcggggaaccccctatctctaccttccccgacgcggctcccacaagacccccatctctgcgccgggcccctccacgtgcggggtctcaggtttgaggtggtcccctccaagtttaaagagaagctggacaaagcctccttcgctactccgtatgggtacgcc

SEQ ID NO: 1048 - RNA, 174 nt, synthetic construct
  source 1..174: mol_type = other RNA
cgcactcccgttccagccaggctgagccttctgtcccctgcctctggggcctgggaaccccccttcttctttctcctgaatggcacccccgccctagaatccagacaccgagtttcccactgtggctggttcaagggtatgtgagagctccctggtgacagtctgtggctgagc

SEQ ID NO: 1049 - RNA, 174 nt, synthetic construct
  source 1..174: mol_type = other RNA
cgccacgcactcctctttctgcctggccggccactcccgtctgctgtgacgcgcggacagagagctaccggtggacccacggtgcctccctccctgggatctacacagaccatggccttgccaacggctcgacccctgttggggtcctgtgggacccccgccctcggcagcctc

SEQ ID NO: 1050 - RNA, 174 nt, synthetic construct
  source 1..174: mol_type = other RNA
cgcccgcccagccccgggggcagggagagcctagattacggaagtaccgcgagcaaggagcgcggaatcggggagcgtccggagctagctggatcctctaggcaggatggtgatgggaatctttgcaaattgtatcttctgtttgaaagtgaagtacttacctcagcagcagaa

SEQ ID NO: 1051 - RNA, 174 nt, synthetic construct
  source 1..174: mol_type = other RNA
cgcccggcgagcccgcgaggtcactatcatatgacaaaggctttgccgcagttcatcttcctccctgtgtactttccatttgccttcctggaatcctgctgcatcacagaagctggaagttctgatgttccactgaaatcacaatggaaagtcttgacttgactggtcacagta

SEQ ID NO: 1052 - RNA, 174 nt, synthetic construct
  source 1..174: mol_type = other RNA
cgcccgggccactgctctccaggaagataaggcttttaaagcagcctagcactagaaggctctgtgtgctccgggatggagcaggtgtgcagagggtgagaacccagctctgggaccaagtcacttgcttccttacttagcaagactatcgacttgagcaaacttggacctggg

SEQ ID NO: 1053 - RNA, 174 nt, synthetic construct
  source 1..174: mol_type = other RNA
cgccggcctgcagtctagccgtagtgcgcctgcgcgcggctaggaggggccgtcaggcggggatacagcctggaaggtaatgcatgtccatggtacacaaattcacaagtttggagaccctgacacacccaccttctcacctgggctctgcgtatcccccagccttgagggaag

SEQ ID NO: 1054 - RNA, 174 nt, synthetic construct
  source 1..174: mol_type = other RNA
cgcctcggcctttgagccccgcccccgccgtgcaaaaacaaccagaggctgctctgcttgagggtgaagccgcctcccagttttccctccccctctacccccacccccatagttctctccaccaggtccagtgacaattggatgatgcagccttgataatcatccgattccaga

SEQ ID NO: 1055 - RNA, 174 nt, synthetic construct
  source 1..174: mol_type = other RNA
cgcgacttttgctttacccttctgctgtgctactgctgtcgcgagacttcctgctcatctgccgctccctttgccgccgccttagcccgggacccgaacccagcctctcccctacccgaacaccggccccggctccaccgaggcccgggtcccccagcccgtctcgccgccgcc

SEQ ID NO: 1056 - RNA, 174 nt, synthetic construct
  source 1..174: mol_type = other RNA
cgcggccgccaaggcgtccttctcctcgaggctgggcagccttgtccgcggcatcacagccctcacctccaagcacgaagaagaaaaattaatccagcaggaactgagtagtctgaaagcgactgtttctgctcctactacaacactgctactggatattttgcttttcagaaa

SEQ ID NO: 1057 - RNA, 174 nt, synthetic construct
  source 1..174: mol_type = other RNA
cgcgggggccgtaggaagccaaccttccctgcttctccggggccctcgccccctcctccccacaaaatcagggatggaggcgcctccccggcaccctcttagcagccctccccaggaaaagtgtcccccctgagctcctaacgctccccaacagctacccctgccccccacgcc

SEQ ID NO: 1058 - RNA, 174 nt, synthetic construct
  source 1..174: mol_type = other RNA
cgcgtcgggctgcaggagaagatggcggtctccacaggagttaaagttcctcgtaattttcgcttgttggaagaacttgaagaaggacaaaaaggagtaggcgacggtacagttagctggggccttgaagatgatgaagatatgacacttacaaggtggacaggcatgattatt

SEQ ID NO: 1059 - RNA, 174 nt, synthetic construct
  source 1..174: mol_type = other RNA
cgctctcctttcgttgcctgatcgccgccatcatgggtcgcatgcatgctcccgggaagggcctgtcccagtcggctttaccctatcgacgcagcgtccccacttggttgaagttgacatctgacgacgtgaaggagcagatttacaaactggccaagaagggccttactcctt

SEQ ID NO: 1060 - RNA, 174 nt, synthetic construct
  source 1..174: mol_type = other RNA
cggaaacatggcggcgggaagagagtgagccgccccgcgcccccgccgcgccctcagatggagaaattagcatacaaagaaactgacttgtcagaagtcagagcaaggtattggtggatccagggataaatcccaaacttcttaacccctagaccggtttttagtccattgact

SEQ ID NO: 1061 - RNA, 174 nt, synthetic construct
  source 1..174: mol_type = other RNA
cggaacttggatcacatcagatcctctcgagcccagggtgacaagattattgatggcgccccatgtgcaagaggctcccacccatggcaggtggccctgctcagtggcaatcagctccactgcggaggcgtcctggtcaatgagcgctgggtgctcactgccgcccactgcaag

SEQ ID NO: 1062 - RNA, 174 nt, synthetic construct
  source 1..174: mol_type = other RNA
cggactgggaggcagggctctggctcacgcttgtaatcccaacattttgggaggacgaagccagcctcatcgcttaagcacaggagttcgaggactgggaggtggaggttgtggtgcctgtatcacctgcccttctgctgacactcctgcctgctgttcctgactacagccatc

SEQ ID NO: 1063 - RNA, 174 nt, synthetic construct
  source 1..174: mol_type = other RNA
cggagggactttctgttagcagcatgagggcctgtggttagacctatagaggtatttcctttgatttaagccagaaagtcctgagagcggatcggggagcatttgcggatcggtcactttttcctcctttctgagtctcttatcccctaccacagggacggcccaggtggcagg

SEQ ID NO: 1064 - RNA, 174 nt, synthetic construct
  source 1..174: mol_type = other RNA
cggcgccggaggaggaagtggtgaggttgttgctccttcagcgcctatcgctggctcttggggcgcagagaggggccgcagtctccgcggctgcgtcgagctcccttgcagtcccctccatgttccccggcgccactactccccttcctaaggccgccgcttaccccggggtct

SEQ ID NO: 1065 - RNA, 174 nt, synthetic construct
  source 1..174: mol_type = other RNA
cggcgcctataaagtcgccctccgcccggacgtaaacaaacctcgcctggctcccagctggtgctgaagctcgtcagttcaccatccgccctcggcttccgcggggcgctgggccgccagcctcggcaccgtcctttcctttctccctcgcgttaggcaggtgacagcagggac

SEQ ID NO: 1066 - RNA, 174 nt, synthetic construct
  source 1..174: mol_type = other RNA
cggcttctgctgctagcgccggagctgagttagttctgagaaggtttccctgggcgttccttgtccggcggcctctgctgccgcctccggagacgcttcccgatagatggctacaggccgcggaggaggaggaggtggagttgctgcccttccggagtccgccccgtgaggaga

SEQ ID NO: 1067 - RNA, 174 nt, synthetic construct
  source 1..174: mol_type = other RNA
cgggcgcacaactgttgctctagaaacttctcctcctgctcccacgggggttacttgcactacccaggctcctcctgtggctcttcctaccccagcaacctggtctacagcactgacctctgctctcccagcacctgccagctgggttcctctctctataggggctgtcaggag

SEQ ID NO: 1068 - RNA, 174 nt, synthetic construct
  source 1..174: mol_type = other RNA
cggggcgccgagacagggcgtgttcgctgttcagtgccggtgttgcagggagtgagggcagctggagtgcgttctgccgaagcttgtggttgcacgcccatcgtcttaggggctaccttccgtgttaccttatcccatatcacacaactggtcctcagccataacaagctaaca

SEQ ID NO: 1069 - RNA, 174 nt, synthetic construct
  source 1..174: mol_type = other RNA
cggggcgccgctgagccaagtgggccacccgggcacggccacgctcccgggtcacgtgacacggagggggccgaattctgctggaggcagcgccatatcctggaggtgaaggtaccacctcatggagacccccgcggccgccgcccccgctgggagcttattcccctccttcct

SEQ ID NO: 1070 - RNA, 174 nt, synthetic construct
  source 1..174: mol_type = other RNA
cggggtctccgggaagtcgcggcgccttcggatgtggcggatgcggccgtgagccggcgggggaggtgctgctgctgcctccactgtactcagacccaggtagcacaggattgtccatcctccagcagctcagtgcaacggtgtgaactcagcctgtttcagagcctccacacc

SEQ ID NO: 1071 - RNA, 174 nt, synthetic construct
  source 1..174: mol_type = other RNA
cgtccctccctggaccccggcgacttcctctctcggtttgtctgggtcatcttgtctgcccgccgctggcctggccccgtctgtctctctcagcagctgtctttctcgcgcccactggccggtctctcctcttccccgcagttgcctccttctctgcctgcctgggtggccgcc

SEQ ID NO: 1072 - RNA, 174 nt, synthetic construct
  source 1..174: mol_type = other RNA
cgtctaaattcgcgtcggttcttatttctctccctggcaaggtctgaagacggatggagtctagttctgtcgcccaggctggagcccagtggtgtgatctcagctcactgcaatctccacctcctggcttcaagcgattcttctgcttcagcctcccgactgtgtcagcgtgtt

SEQ ID NO: 1073 - RNA, 174 nt, synthetic construct
  source 1..174: mol_type = other RNA
cgtctgggcagattattcctatgcatcctgccttcctcacccaggactggtctgagagggattcatgatggaagcatgttcattctgtgacctggttctcgcctaaatgtggtcaacagtgtcagcagttcagaggacatcaagcccttaccagggcttcccgggattggaaac

SEQ ID NO: 1074 - RNA, 174 nt, synthetic construct
  source 1..174: mol_type = other RNA
cgttgcggccgctccctgccttagaggccagccttggacacttgctgcccctttccagcccggattctgggatccttccctctgagccaacatctgggtcctgccttcgacaccaccccaaggcttcctaccttgcgtgcctggagtctgccccaggggcccttgtcctgggcc

SEQ ID NO: 1075 - RNA, 174 nt, synthetic construct
  source 1..174: mol_type = other RNA
ctaaactgagccttgaagaatggttaagagtttgctccaggaatatattgcaaaggcattcttggcggaaggacccgagacgtgaaaaaaacaggcgtattctggtaatttcgaggagaggtcgacagtgtggggagttggagtgacccggctggatgtgacccccaggacaga

SEQ ID NO: 1076 - RNA, 174 nt, synthetic construct
  source 1..174: mol_type = other RNA
ctacacatctcattatagtttagggagtctcgctctatcccctaggctggagtgcattggcgccatctcggctcatttgcaacctctgtctcccgggttcaagcgattctcctgcctcagcttcccgaggagctgggattacaggtcctgagggagtctaacaagttagcagaa

SEQ ID NO: 1077 - RNA, 174 nt, synthetic construct
  source 1..174: mol_type = other RNA
ctacctgaaaaccctggccgggtgctggggcttgaggagcagttcccacttcccagtctttttcacttttcacagctgcaaagttcagggagttgaactgcagtgctttcagttcactgctcactctgccacgatcaatctctgttgtaaattttcctcccagagcacgtgacg

SEQ ID NO: 1078 - RNA, 174 nt, synthetic construct
  source 1..174: mol_type = other RNA
ctactgtgtacttacaaaccacactcatattcgtcacgtcatttcatcttcacccccacctccaaatgaggcttgaaatgagatgagatgttcctccctcccctttcaaccatggacctcacactgtggacttcctcttagagcctctgagttaggtacccaagccaaggcaca

SEQ ID NO: 1079 - RNA, 174 nt, synthetic construct
  source 1..174: mol_type = other RNA
ctaggggtcgggctcggccgtcgtcgttgtttgtcgccgcatccccgcttccgggttaggccgttcctgcccgccccctcctctcctcccttcggacccatagatctcaggctcggctccccgcccgccgcagcccactgttgacccggcccgtactgcggccccgtggccacc

SEQ ID NO: 1080 - RNA, 174 nt, synthetic construct
  source 1..174: mol_type = other RNA
ctatcaaggaagaaattgccaaaccatgtctttttttctgttttcagagtagttcacaacagatctgagtgttttaattaagcatggaatacagaaaacaacaaaaaacttaagctttaatttcatctggaattccacagaaccttcggctcgcgtgcttctgagctgctgtgg

SEQ ID NO: 1081 - RNA, 174 nt, synthetic construct
  source 1..174: mol_type = other RNA
ctcactgcaagctctgcctcccggttgctgaacctgtttgcatgagttgctcctgacggccctttaggatacttccatgtctgtagggtctagagtgacatctcctcccctcccctgacgagatctgccctccttggcactgtgcttccccagaggggtggcctcgctgttccc

SEQ ID NO: 1082 - RNA, 174 nt, synthetic construct
  source 1..174: mol_type = other RNA
ctcagcagtatttgcggaggttttcacaggaggccgttgcttcgtaaatattatacatgtattcttctttttggagcattttgattattactctcagacgtgcgtggcaacaagtgactgagacctagaaatccaagcgttggaggtcctgaggccagcctaagtcgcttcaaa

SEQ ID NO: 1083 - RNA, 174 nt, synthetic construct
  source 1..174: mol_type = other RNA
ctcagttaatgcaattttgaagcatgccctgaatagattcagtcattatcaagtcaaactaaaaacggtgaaaggttgcgactattaccaaataggaaaaatctgaagacataagaactacacatgaggaatatgtcatttagcactttcactttttgatctccacagaagaca

SEQ ID NO: 1084 - RNA, 174 nt, synthetic construct
  source 1..174: mol_type = other RNA
ctccccactctcaggctggtggggtggggaaagcagcccattcctgggctcagagactcccaccccagctcagagggagcaggggcccagccagggacggaccctcattcctcccagggaccccagacctctgtctctctcggcaggccttggctccttgaacttttggccgcc

SEQ ID NO: 1085 - RNA, 174 nt, synthetic construct
  source 1..174: mol_type = other RNA
ctcccgcggtcctgctcggcggagtggggcattcttcgggggtgcatcagagggagggcagagcctgaggatctaagcgaaggcttccccgggtgtaatttcctgggctgtttgtgaggagagatcgaattcgcctcctgctctcaggcctctctgctcctgtcttttgtttgg

SEQ ID NO: 1086 - RNA, 174 nt, synthetic construct
  source 1..174: mol_type = other RNA
ctccgctccaatcccggaagtgcgcgcggccccgcccccgccggttcgcgtctctctgctgcggcgcggggaccgctgtgctctcggaaacggggtctctgggggatccagtgacgtgcccaaccacagagaccagacccctcctcctgtagagagtggtgctgccctctcggg

SEQ ID NO: 1087 - RNA, 174 nt, synthetic construct
  source 1..174: mol_type = other RNA
ctcctgggcccctcctcccttcaaggattgcgaagaactggtcgcaaatcctcctaagccaccagcatctcggtcttcagctcacaccagccttgagcccagcctgcggccaggggaccacgcacgtcccacccacccagcgactccccagccgctgcccactcttcctcactc

SEQ ID NO: 1088 - RNA, 174 nt, synthetic construct
  source 1..174: mol_type = other RNA
ctcgaggtgggcggggagaagggggacgggcgcggacccgggtcccagggccaggcctcccttgtgagtagactatgcaaagaaaaagtgggccaccatatctggaaactacagtctatgctttgaagcgcaaaagggaataaacatttaaagactcccccggggacctggagg

SEQ ID NO: 1089 - RNA, 174 nt, synthetic construct
  source 1..174: mol_type = other RNA
ctctgaaggcatggcgcgtacgaagcagactgctcgcaagtccaccggcggcaaggctccgcgcaagcagctggccaccaaggcggctcggaagagcgctccggccaccggcggtgtcaagaagccccatcgctatcggcctggtacagtggctctccgcgagattcgccgcta

SEQ ID NO: 1090 - RNA, 174 nt, synthetic construct
  source 1..174: mol_type = other RNA
ctctgtggttcgggtccgctttcgtctccgtcctgctgccgttaccgccgctgctgccgccgcttgcgtcccccgctccggtctgtggtgcagccgggacccaggaccatgtctctgtctcgctcagaggagatgcaccggctcacggaaaatgtctataagaccatcatggag

SEQ ID NO: 1091 - RNA, 174 nt, synthetic construct
  source 1..174: mol_type = other RNA
ctctttccgtctcaggtcgccgctgcgaagggagccgccgccatgtctgcgcatctgcaatggatggtcgtgcggaactgctccagtttcctgatcaagaggaataagcagacctacagcactgagcccaataacttgaaggcccgcaattccttccgctacaacggactgatt

SEQ ID NO: 1092 - RNA, 174 nt, synthetic construct
  source 1..174: mol_type = other RNA
ctgaattctccattctgggctcttgcctgtgaaatctttctttgctttccccatcttttcctcgcattttttcaccatctttccctcaatctccaggagccaatgcgagactttggctccgattaagcgacggcccgagactcggggtgcgcgaggaggatcgacagagtggtg

SEQ ID NO: 1093 - RNA, 174 nt, synthetic construct
  source 1..174: mol_type = other RNA
ctgatgtcttcatcattctcaaattcttaggacggtcgggccctggaaggaacgctctcggaattggccgcggaaaccgatctgcccgttgtgtttgtgaaacagagaaagataggcggccatggtccaaccttgaaggcttatcaggagggcagacttcaaaagctactaaaa

SEQ ID NO: 1094 - RNA, 174 nt, synthetic construct
  source 1..174: mol_type = other RNA
ctgatgtgagctagtttgtctggttgagttggatgtttaaatagaaggcagaacaacaacaggtactccacatcagcattctcaagactggagaagttaggcctcagacatcccaagccttctcctttcattggaaacttgacatttttccgccagggtttttgggaaagccaa

SEQ ID NO: 1095 - RNA, 174 nt, synthetic construct
  source 1..174: mol_type = other RNA
ctgcagacgaggcaggcggaagaggcgggacttcgcgggtgacgtcatcggggcgccggaggcccggggcgcctgggaatttgaagcaaacaggcagcgcgcgacaatggcggtcgctcgtgcagctttggggccattggtgacgggtctgtacgacgtgcaggctttcaagtt

SEQ ID NO: 1096 - RNA, 174 nt, synthetic construct
  source 1..174: mol_type = other RNA
ctgcagaggagaccggagggcagaaggcagagtccaggcttagactgcagttcctcgcttacctgtgcagtctaattttgagctgcctctttgtagtcttaaaaggcaggagcttcgtgttgtgggtctgctaacccgtacgtttccgtgggcaagtcgtgtgtactcctcgcc

SEQ ID NO: 1097 - RNA, 174 nt, synthetic construct
  source 1..174: mol_type = other RNA
ctgccctcctgcttccgttgctagggacgcttcggccgaggataccgcaatggatcaggaagaggggctgaaggccttggacaatattgtcactcaattcaacgcctatgaagatttcctggactcgcagatcactactgtggacttgtactacctggaggatgaaaccctggc

SEQ ID NO: 1098 - RNA, 174 nt, synthetic construct
  source 1..174: mol_type = other RNA
ctgcgcggaagagtgctggccctggggaagccccttcctcacccaggcttcacacatttgaccctggctctctctcaggaggacccctcgctggaaaggcattttaagggccaccgagatgcagttacctgtgtggacttcagtatcaacacaaagcagctggccagtggctcc

SEQ ID NO: 1099 - RNA, 174 nt, synthetic construct
  source 1..174: mol_type = other RNA
ctgctccaagtgtcctagatcaggaccctaggtaaagacttctgaaaaatacttgagtctagaaacagaaaagaaaaagggctagtgtgctctaggggtttgcactgttgtacccagtttgctttgctgtgtcctaggaaaggtcctttctggggatcaccccattggctgaag

SEQ ID NO: 1100 - RNA, 174 nt, synthetic construct
  source 1..174: mol_type = other RNA
ctgctccttccgcgggtttccgactccctgccctagattttctgcttagcgacttggggtcccctctcgtttgcttctggtaggagtcgcaatcccagcagcaatagcccagaagaggacacggttcccgtaccgaagggttcagtaccagcagcccgaccatcacgcggcggg

SEQ ID NO: 1101 - RNA, 174 nt, synthetic construct
  source 1..174: mol_type = other RNA
ctgctctgctctctattgattgtgtttctggagggcgtcctgttgaattcccacttcattgtgtacatccccttccgttccccccaaaaatctgtgccacagggttactttttgaaagcgggaggaatcgagaagcacgatcttttggaaaacttggtgaacgcctaaataatc

SEQ ID NO: 1102 - RNA, 174 nt, synthetic construct
  source 1..174: mol_type = other RNA
ctgctctgtggtacttcctctctggctgatttagcaaacagcacctagacctggggccaggcctttggcagtgggacagatccagggataggctacaccaccctgccctgaccctgggattggcatcagcttccaaccagttcctgccaaagcttgtaagtcctcccgacggcc

SEQ ID NO: 1103 - RNA, 174 nt, synthetic construct
  source 1..174: mol_type = other RNA
ctgctgacaccttgatcttggacttcccatcttccaggaaggcctgacctcagttgttccagggtaaagaatttgggcagtgcccacacccacgctgttggataacatttcttcaccataccagtgagggtgaatgtgtacacgcccagcttcctgcctgttactctccacagt

SEQ ID NO: 1104 - RNA, 174 nt, synthetic construct
  source 1..174: mol_type = other RNA
ctgctgtgcagggcagggaagctccaggcaaacagcccagcaaacagcagcactcagctaaaaggaagactcacagaacacagttgaagaaggaaagtggcgatggacctcatcccaaatttggcggtggaaacctggcttctcctggctgtcagcctggtgctcctctatcta

SEQ ID NO: 1105 - RNA, 174 nt, synthetic construct
  source 1..174: mol_type = other RNA
ctggaaggtgaattcatttttctgggtctctctgattctcagggactccagaccttcctatttatgttgttttttgtattctatggaggaatcgtgtttggaaaccttcttattgtcataacagtggtatctgactcccaccttcactctcccatgtacttcctgctagccaac

SEQ ID NO: 1106 - RNA, 174 nt, synthetic construct
  source 1..174: mol_type = other RNA
ctggacgccttgctcctgcttctgctacgaccttctggggaaaacgaatttctcattttcttcttaaattgccattttcgctttaggagatgaatgttttcctttggctgttttggcaatgactctgaattaaagcgatgctaacgcctcttttccccctaattgttaaaagct

SEQ ID NO: 1107 - RNA, 174 nt, synthetic construct
  source 1..174: mol_type = other RNA
ctggccacgccctctccgcgagtccagtcccacgcgggatgaagagggcaccctccgccaagaggctgctgcgggacccgggtttcccctttccggcgccttccagcctcccaatcctcgggtctcgcctccctccgtctcctccctttcccctgtctgtctttccattggtcc

SEQ ID NO: 1108 - RNA, 174 nt, synthetic construct
  source 1..174: mol_type = other RNA
ctggggcccgctgtcggtctcccgtcctccgacatcttgtctggaacttccgcctggcagtctccagtaggagtggagctctgtgcggcgtagtttggtggaaaaacgggccttgcgtcggcctcacccccagtgtttgtgtttcagaatgaagactattctcagcaatcagac

SEQ ID NO: 1109 - RNA, 174 nt, synthetic construct
  source 1..174: mol_type = other RNA
ctggttcctgagggagaatccacaagccccctcccctcttcagtggatactgaagactccctcgacgaaggacccggggccctggtattggagagtgatttgctactaggccaggatctggagtttgaggaggaagaggaagaggaggaaggcgacggcaacagtgaccagctc

SEQ ID NO: 1110 - RNA, 174 nt, synthetic construct
  source 1..174: mol_type = other RNA
ctgtggcctcggggagtgggaagtggaggcaggagccttccttacacttcgccatgagtttcctcatcgactccagcatcatgattacctcccagcagataaccttgcctcgtacttactcaacaaaagtgaagccaaaagatactattttttggatttgggtggcttttcttc

SEQ ID NO: 1111 - RNA, 174 nt, synthetic construct
  source 1..174: mol_type = other RNA
ctgtttgaacgggctctcccttgggtgcttagccccgcccccgtcccactctgccctgttgctgtcgcgccgctgctggttgctgtccctggtggggtggaagacaacccgtgagtattacaccttcatgtgggttactttgcccattgacctaaacaacaaatcagctaaaca

SEQ ID NO: 1112 - RNA, 174 nt, synthetic construct
  source 1..174: mol_type = other RNA
cttcatctctccatctctgcgctgctgccggctgcgccatccagcacccagactccagcaccggccgaggacccccactccggctgcagggaccctgtcccagcgagaccgcaggcatgtcatccgaaaagtcaggactcccagactcagtccctcacacttctccgccgccct

SEQ ID NO: 1113 - RNA, 174 nt, synthetic construct
  source 1..174: mol_type = other RNA
cttcgcagagcatggcggcgggcgagcttgagggtggcaaacccctgagcgggctgctgaatgcgctggcccaggacactttccacgggtaccccggcatcacagaggagctgctacggagccagctatatccagaggtgccacccgaggagttccgcccctttctggcaaaga

SEQ ID NO: 1114 - RNA, 174 nt, synthetic construct
  source 1..174: mol_type = other RNA
cttgacaccagcagggtgacatccgctattgctacttctctgctcccccacagttcctctggacttctctggaccacagtcctctgccagacccctgccagaccccagtccaccatgatccatctgggtcacatcctcttcctgcttttgctcccagtggctgcagctcagacg

SEQ ID NO: 1115 - RNA, 174 nt, synthetic construct
  source 1..174: mol_type = other RNA
cttgccgcgctgcactccaccacgcctcctccaagtcccagcgaacccgcgtgcaacctgtcccgactctagccgcctcttcagctcgccatggatcccaactgctcctgcgccgccggtgactcctgcacctgcgccggctcctgcaaatgcaaagagtgcaaatgcacctcc

SEQ ID NO: 1116 - RNA, 174 nt, synthetic construct
  source 1..174: mol_type = other RNA
ctttatgttttgggattgtagttatgttagatattcctcagttggggtaattgtcttgcatcattatctcttatcataatctgtttttcttcacacagtgttatagttttgccgctggactcttccctcccttcccccaccccatcaggatgatatgagacttgaaagaagacg

SEQ ID NO: 1117 - RNA, 174 nt, synthetic construct
  source 1..174: mol_type = other RNA
ctttgaccacctgatattgcttacatctggaacttcttggcttctcattccccagatgtgcgggtcagagaggagaagtttcaggagtctctaaagaagctgaagaacgaggagcaggaagctgagaagctaacagcttttatcagagagaagaaaacatcctggaagaatcag

SEQ ID NO: 1118 - RNA, 174 nt, synthetic construct
  source 1..174: mol_type = other RNA
ctttgccaggaggctgcaccctgagatgccctctcaatttctccttcaggttcgcagagaacaggccagccaggaggtcaggaggccccagagaagcactgaagaagacctgcctgtgggtctcaattgcccagctccggcccacactctcctgctgccctgacctgagtcatc

SEQ ID NO: 1119 - RNA, 174 nt, synthetic construct
  source 1..174: mol_type = other RNA
cttttaacgagggaccgagctacttccgggagagaatgggagggtggaaaattttgtgcgtttggcgggtttcgctctcttcataagtattgatcattccgcagccctggggaccggacacgtgaggaggtagtgacgccgacactgccagaacacactgctacaaggtcccag

SEQ ID NO: 1120 - RNA, 174 nt, synthetic construct
  source 1..174: mol_type = other RNA
ctttttggagagtggtaatgtcttcctctttttgctttaggagaaagacagaataataagctgaatagaatctgaccattggctttcacctggccaggaccttctatgtagctctccttttgtggcccatgtgctgcatcctctgccctcagtgtgcaactggcccccaacgca

SEQ ID NO: 1121 - RNA, 174 nt, synthetic construct
  source 1..174: mol_type = other RNA
gaaattaactgttagcagtagtgtttcttaatacataagctatatcatactcctcaagtagattctttgcttaaaactttcactgtaaataattttatagcaaccatgtgaataacttaagaataatagaatcagtctcatttgtaggcactgtagaccatctccattccctac

SEQ ID NO: 1122 - RNA, 174 nt, synthetic construct
  source 1..174: mol_type = other RNA
gaacccgtttcttttccttccccagtgcgtctttcctgcgtcgttccggcgcggcgggagcagagatctgcggccgtttgcagcttgcggtagggaggcgtggtggtctgaagcctccgagcagccgcggccatggcggatgtaaccgcccgtagtctgcaatacgagtacaag

SEQ ID NO: 1123 - RNA, 174 nt, synthetic construct
  source 1..174: mol_type = other RNA
gaactgttccccagagcattgttcctgagaaggaaaagagtccaaacacctacccacacctgctttgtgccaagaatccacagttggattgcaaggacagtgcgttcaagacccagctgttgagagtagaaaagcagaagaaaggacccgaggtcagcaagtgccctccccaca

SEQ ID NO: 1124 - RNA, 174 nt, synthetic construct
  source 1..174: mol_type = other RNA
gaagaacctttgaattctaacggctgagctcttggaagacttgggtccttgggtcgcagggtctcactccattgcccaggccagagtgcggggatatttgataagaaacttcagtgaaggccgggcgcggtggctcatgcccgtaatcccagcattttcggaggccgaggcatc

SEQ ID NO: 1125 - RNA, 174 nt, synthetic construct
  source 1..174: mol_type = other RNA
gaagactgagcggttgtggccgcgttgccgacctccagcagcagtcggcttctctacgcagaacccgggagtaggagactcagaatcgaatctcttctccctccccttcttgtgagatttttttgatcttcagctacattttcggctttgtgagaaaccttaccatcaaacacg

SEQ ID NO: 1126 - RNA, 174 nt, synthetic construct
  source 1..174: mol_type = other RNA
gaagagtggaacccatacttgctggtctgatccatgcacaaggcggggctgctaggcctctgtgcccgggcttggaattcggtgcggatggccagctccgggatgacccgccgggacccgctcgcaaataaggtggccctggtaacggcctccaccgacgggatcggcttcgcc

SEQ ID NO: 1127 - RNA, 174 nt, synthetic construct
  source 1..174: mol_type = other RNA
gaagagtttgttggactcaacgaggttcgagaggcccagggaaaggtgacagagctcacaccccagtgacctcttctgggaatgcctcgctgggaatgcagctgagcctgtgtgggtgtggagagaaggtgcagatggcctccggttttctctttgcaggctgagaaagtgttc

SEQ ID NO: 1128 - RNA, 174 nt, synthetic construct
  source 1..174: mol_type = other RNA
gaaggatattgccgtaattctgaaagtttttttccttcctctcttcccttcgcagaggtgagtgccgggctcggcgctctgctcctggagctcccgcgggactgcctggggacagggactgctgtggcgctcggccctccactgcggacctctcctgagtgggtgcgccgagtc

SEQ ID NO: 1129 - RNA, 174 nt, synthetic construct
  source 1..174: mol_type = other RNA
gaaggatccgttttggcgggcggttggcgttgcgcagaaggcggcggcggtggtggcttgtggtgcggcctcaccatacaggaacagggcagacgttagcgtgagtgatcactctcaatcccggggacctggtggccttagtctttcaggtggaacggtgtgcgacatgggaaa

SEQ ID NO: 1130 - RNA, 174 nt, synthetic construct
  source 1..174: mol_type = other RNA
gaagtgtgtcagggccagcgtgccggccctacggaagccgagcctgaggcgagatctcgccttttgtattttcactgactcatatttcctttactcaggctcccacatcaggacgagaaggagccctcgagttaccgtgggagctgtgggagctgccctgtgactcttaggaag

SEQ ID NO: 1131 - RNA, 174 nt, synthetic construct
  source 1..174: mol_type = other RNA
gacaccccctgggatcacactgagcttgccacatccccaaggcggccgaaccctccgcaaccaccagcccaggttaatccccagaggctccatggagttccctggcctggggtccctggggacctcagagcccctcccccagtttgtggatcctgctctggtgtcctccacacc

SEQ ID NO: 1132 - RNA, 174 nt, synthetic construct
  source 1..174: mol_type = other RNA
gaccttctctttccctttccagcagccggagaagtgcgacaacaaccagtactttgatatctccgccctctcgtgtgttccttgtggagctaaccagaggcaagatgcccgaggtgttacagaagatggctggaactgcatttcttgccctagtgacttaactgccgaaggaaa

SEQ ID NO: 1133 - RNA, 174 nt, synthetic construct
  source 1..174: mol_type = other RNA
gacgccgatgcggagctgagctggctttcctccagggctctggactccctgctgagcaagagagaaagaggcccgcccttccaccaggacgcctgaccctggggtccttcccaaacccgggtctcttccgactccgggcccaacagtttgtgcgattaaagtgaagaaacaatg

SEQ ID NO: 1134 - RNA, 174 nt, synthetic construct
  source 1..174: mol_type = other RNA
gacgggcgctttggagccggccccaggcagcgtgtgtcggtcgcctagtctggagaactagtcctcgactcacgagatgaagttttaccatgttggccaggctggtctcgaattcctgacctcaagtgatctgcccaccttgacctcccaaagtgctgggattacagtgcaagg

SEQ ID NO: 1135 - RNA, 174 nt, synthetic construct
  source 1..174: mol_type = other RNA
gactacaaggagacagaaggctgaggccggggtgctagagaaccttgccgtgctggaattcacgttgacgcccccacggagctctgctgcagagccctcgagtcccgcacttccggccgccaggtggcgctggttctgttgccaactcggagagactgagctgggccacgcaag

SEQ ID NO: 1136 - RNA, 174 nt, synthetic construct
  source 1..174: mol_type = other RNA
gactgagcctcctgcttgaggtagttgtttttactcccagtccccaggctcacgagccccacgcgcgctcaatctgccctcccgcttctcctcgccactccgagttctgcgccctcgagatccagcgcatccgcggggtgggcgggtcctggcggctctttgccctcttccaac

SEQ ID NO: 1137 - RNA, 174 nt, synthetic construct
  source 1..174: mol_type = other RNA
gactggcactttttcttttttctcagcaaactgtacaaaaccaaatctctttttgattttcaaggaaactaggttcctgccaaattttgaatctggacaataaacagacactttgtcctagcatctttctggaatcatttcgggatattttccacaagcaacacagaaacagga

SEQ ID NO: 1138 - RNA, 174 nt, synthetic construct
  source 1..174: mol_type = other RNA
gacttctataaaaccctaagaggaggagctactgtgaaggtttctgcgtcttcaccctcactggctgtcgcttctcaatcagactccaagcagcgaagacttttggttgattttccaaaaggctcagtaagcaatgcgcagcagccagatctgtccaaagcagtttcactctca

SEQ ID NO: 1139 - RNA, 174 nt, synthetic construct
  source 1..174: mol_type = other RNA
gacttgctctctaaagttgcaattgtaagaagaatgttgggtttccagattgctcttctgggcgtgggagaaggttctgtctatcagtgctgcgagaaaggaaagaaacaagtttgctctcagcggatctttaaatggatgagatggctaccactcagatttccaaagatgagc

SEQ ID NO: 1140 - RNA, 174 nt, synthetic construct
  source 1..174: mol_type = other RNA
gagaaagaggacagagctgcccagtccttactcaacaagctgatcagaagcaaccttgttgataacacaaaccaagtggaagtcctgcagcgggatccaaactcccctctgtactcggtgaagtcttttgaagagcttcggctgaaaccacagcttctccaaggagtctatgcc

SEQ ID NO: 1141 - RNA, 174 nt, synthetic construct
  source 1..174: mol_type = other RNA
gagaatagttagcaaacaagggaggttgtcatttcctcatcgtcaagctttgttcctcgtgggggctagaaatctctttccagttccagattgtgaagggttcctgagtaagcagcgtgtctccatccccctctctaggggctcttggatggaccttgcactctagaagggaca

SEQ ID NO: 1142 - RNA, 174 nt, synthetic construct
  source 1..174: mol_type = other RNA
gagagaccttggagcgcgcgggaaagagaccaatataaactgtggcgggatagttttcgggtccttgtccagtgaaacaccctcggctgggaagtcagttcgttctctcctctcctctcttcttgtttgaacatggtgcggactaaagcagacagtgttccaggcacttacaga

SEQ ID NO: 1143 - RNA, 174 nt, synthetic construct
  source 1..174: mol_type = other RNA
gagaggcgcatctgcgcaggcgcccggctcctaagtctacccaggaactgaccctgctctctcctttccctgttagacatgggcactccacagaaggatgttattatcaagtcagatgcaccggacactttgttattggagaaacatgcagattatatcgcatcctatggctca

SEQ ID NO: 1144 - RNA, 174 nt, synthetic construct
  source 1..174: mol_type = other RNA
gagattttggactctgtcttcagctggacactccctccctgcaccatgtcttacagttgtggcctgcccagcctgagctgccgcaccagctgctcctcccggccctgtgtgccccccagctgccacggctgcaccctgcccggggcctgcaacatccccgccaatgtgagcaac

SEQ ID NO: 1145 - RNA, 174 nt, synthetic construct
  source 1..174: mol_type = other RNA
gagcagagccctttcacacacctcaggaacacctttcggctgcccgctccccagacacacctgcagccctgcccagccggctttgctcacccactgcttgtaaatgccccagatatgagccagcccaggccccgctacgtggtagacagagccgcatactcccttaccctcttc

SEQ ID NO: 1146 - RNA, 174 nt, synthetic construct
  source 1..174: mol_type = other RNA
gagcagggagtcagagacgccccgttccaggacccttgtcaccgggagacaggagcggggaggatctgtggggtcctgggttcagcactctgccctgctgccgctgaggagaggtcagccctgacaaaggtcagctagccccttgaggacatcagctttggcctcagggtccta

SEQ ID NO: 1147 - RNA, 174 nt, synthetic construct
  source 1..174: mol_type = other RNA
gagccgtacgcctctgtaaacccaacttcctcacctttgaaacagctgcctggttcagcattaatgaagattagtcagtgacaggcctggtgtgctgagtccgcacatagaagaatcaaaaatgtccaaaatgtaactggagagaaagtgggcaacttttggagaacttctgca

SEQ ID NO: 1148 - RNA, 174 nt, synthetic construct
  source 1..174: mol_type = other RNA
gaggaaggagagagtggaggaggagggctttgggttagggagagtgctttcgtttgttttaaatgggagaaactggagcatgttgccaagggcagagagccagcagagaggggtgaatggaagaaggagcgagaagggggttactgacgaagccttatcctggaggagagaagg

SEQ ID NO: 1149 - RNA, 174 nt, synthetic construct
  source 1..174: mol_type = other RNA
gaggagcctgaggaagagggcggcgacggtggtggtgactgagcggagcccggtgacaggatggctgggcacagattggtgttggtattaggagatctgcacatcccacaccggtgcaacagtttgccagctaaattcaaaaaactcctggtgccaggaaaaattcagcacatt

SEQ ID NO: 1150 - RNA, 174 nt, synthetic construct
  source 1..174: mol_type = other RNA
gaggcccagctgtaaattcctctctttgtactctttctctttatttctcagaccagccgacacttagggaaaatagaacctacgctgaaattttgggggcaggttctcttgctaggttttgaggttttgctgaagatattcctgaagaatcatcccaggtgccacactaaaaaa

SEQ ID NO: 1151 - RNA, 174 nt, synthetic construct
  source 1..174: mol_type = other RNA
gagggacatcttttcaagtagaggctgtgttggggcatggtgagagagggtcttagcaggtaaccttcctttcctctccagactgaggaatcagagttctgattgtggagtgcctctctctaggacggggctgcagcataggagtctcagctgcttacatccaggtccaggatt

SEQ ID NO: 1152 - RNA, 174 nt, synthetic construct
  source 1..174: mol_type = other RNA
gaggtcggagcggaaggacgtcgtggagattgcttgcgctggggtgccacacttaggctgagctgcaggttttcgcacagtcgcgagttaacctctgcttgctccagaggcctcgtcctaatccacctcggctgacggcgcgggatccctggctccgcgagcctcagcctcacc

SEQ ID NO: 1153 - RNA, 174 nt, synthetic construct
  source 1..174: mol_type = other RNA
gagtcacgtgggtccccccggttccggcgcggttgaggccttcggtggtgaacgagtctccagcaccatgtctggtttgtctggcccaccagcccggcgcggcccttttccgttagcgttgctgcttttgttcctgctcggccccagattggtccttgccatctccttccatct

SEQ ID NO: 1154 - RNA, 174 nt, synthetic construct
  source 1..174: mol_type = other RNA
gagtcctgctagatccccgcaagctaggccagctcctcccactgcctcccttcctctttctcctcctcttactcctttccagccagaccttggctgtctacaggatgggggacaccctgagccccggacatggcaaccacagagagagcagcccttttctttcccccttggagg

SEQ ID NO: 1155 - RNA, 174 nt, synthetic construct
  source 1..174: mol_type = other RNA
gagtggcagttatatagaccggcggcggagcacgcgtgtgtgcggacgcagttgcgtgaggggtttgtactatcctcggtgctgtggtgcagagctagttcctctccagctcagccgcgtaggtttggacatatttgactcttttccccccaggttgaattgaccaaagcaatg

SEQ ID NO: 1156 - RNA, 174 nt, synthetic construct
  source 1..174: mol_type = other RNA
gagttgcagtttgagagcagttccgggcagggaggcgcctttgctgccctcacagacttggcccctagcagtgcagaactacaagtcccagggatcctagcgaccgtccgtccgtagtcaagttgccggtggaattggcccaggatgacagctggagaatggagtcagttttat

SEQ ID NO: 1157 - RNA, 174 nt, synthetic construct
  source 1..174: mol_type = other RNA
gatctacaggagggcggctgtactgtgcttcgccttatatagggcgacttggggcacgcagtagctctctcgagtcactccggcgcagtgttgggactgtctgggtatcggaaagcaagcctacgttgctcactattacgtataatccttttcttttcaagatttttattttag

SEQ ID NO: 1158 - RNA, 174 nt, synthetic construct
  source 1..174: mol_type = other RNA
gatctactaagcatcatttttgcatgactactgcaaaaggattactttacagataccagttcctttgtcaagagcatactttggaccctgttttcagaaagcagggcactctttaatgaagaaacaccagagctgttaaacacattgagacacagaagattctagtgactgagg

SEQ ID NO: 1159 - RNA, 174 nt, synthetic construct
  source 1..174: mol_type = other RNA
gatgatgtcagcactgcttccggtcggtggcgcttctctctggcccgagccagcatgatccgctgggcccccagcgcatctcctggaagagcccactcaccctggacgagctcttcggtagcctcagaccgtccttgaagaggatgactgagacattatgggccacgcgctgtg

SEQ ID NO: 1160 - RNA, 174 nt, synthetic construct
  source 1..174: mol_type = other RNA
gatggcggcagcgatgcctgcccggctgttggggtggcggtgacgacaggcagcaaaagaccagataatgcctcacatctctgtccccccgggaccccctggagcccccatgatccctaagaagacagcttgaacctagaattcccctctccctccctagatctcacccccagg

SEQ ID NO: 1161 - RNA, 174 nt, synthetic construct
  source 1..174: mol_type = other RNA
gattacagtgccaaccttactcccaaagtttgccacgaaatatctcgcttctgttattttcgcatggttctggtatattgacttttgaaacaaaagacatcattctgtttatagcattctgtttttagtagtgggatttccatctacaaaatatagtaattctcgatcgctgaa

SEQ ID NO: 1162 - RNA, 174 nt, synthetic construct
  source 1..174: mol_type = other RNA
gattccgtagagacactcctccgctgcctgagtcctcggcgaacatggcggcccccgagtcagggccggctttgagtccaggcactgcagagggtgaggaggagacgattctctatgacttgttggtcaacaccgagtggccaccggagactgaagtacagcctagaggcaacc

SEQ ID NO: 1163 - RNA, 174 nt, synthetic construct
  source 1..174: mol_type = other RNA
gattggctgggacggctgtgggtggggagaagccgggaggactgggtgcgcctgcagggatcggaagccggttggggtgtgagaggttttctcgctctagggagattcttcaagcaatcactatgtcaacagacacaggtgtttcccttccttcatatgaggaagatcagggat

SEQ ID NO: 1164 - RNA, 174 nt, synthetic construct
  source 1..174: mol_type = other RNA
gcaaacaccgagctcctccagagccgcccgggagcagggagggctccgctagcccggggggccctccccgcggggcagatgagttccatatccagactctcaaaccatgttttgggatcatccaaacattccatcctcctgactccataaactattggattcataacctgctcc

SEQ ID NO: 1165 - RNA, 174 nt, synthetic construct
  source 1..174: mol_type = other RNA
gcaacacaaggattcccctccagctctgtgatgtggggagcagagggccactgagtcctgccatgggcatggtctagtggcccagtcaggacgcggaaacactccctggaggttctgacccactccctctcagcctccgcctggtctctggtgtagtcgccgccgccagccgcc

SEQ ID NO: 1166 - RNA, 174 nt, synthetic construct
  source 1..174: mol_type = other RNA
gcaagaaactgagagtgagaaagaagggactggccagagttactcagctagacagtgacagacaacagtggaacttctgattggcaaacgcactgcctacttacagcatagagacccccagtggagagctagactgtttgaattccagaaggaccaacaccagataaattatga

SEQ ID NO: 1167 - RNA, 174 nt, synthetic construct
  source 1..174: mol_type = other RNA
gcacacacgggcgcgcacacacacgcgcgtacacactgggtctccaggcagcggccgtcgccgcatccccggcagcagctccaggcaaagtgacagaggacagtgctgctgtgagtttgacgaagtggacatcacctgcagtcagtccagagctgcccagtcttgaatataatc

SEQ ID NO: 1168 - RNA, 174 nt, synthetic construct
  source 1..174: mol_type = other RNA
gcagaaagaatgtggattttagagttctagataggggttttcatttaggccttgcgacatggctgttacatgaccttggttggtctgtttccctaacctctttgtgcctcatttgtcttacctactaaataggctaatagtactacctcgcagcatgaagatgattttaataag

SEQ ID NO: 1169 - RNA, 174 nt, synthetic construct
  source 1..174: mol_type = other RNA
gcagattctgtggttatactcactcctcatcccaaagaatgaaatttaccactctcctcttcttggcagctgtagcaggggccctggtctatgctgaagatgcctcctctgactcgacgggtgctgatcctgcccaggaagctgggacctctaagcctaatgaagagatctcag

SEQ ID NO: 1170 - RNA, 174 nt, synthetic construct
  source 1..174: mol_type = other RNA
gcagccattttaattcatatttgagtgggcggtggcgattggtgttggcggtctggctcagctgggcagggggtaactttactgatttgggggtggtttttagtttaatttttcttttctagcttcccatcgacggtcagtgcgcacgttgtaatcagctgaggccatgtcagg

SEQ ID NO: 1171 - RNA, 174 nt, synthetic construct
  source 1..174: mol_type = other RNA
gcagcgcacacggccagctccgcgcaggcagactgcacagcccgccccaagggtcacgcccaccctgctaaggtgctaactttggacatctacttgagtaagactgagggggcacaagtggacgagccggtcgtgattactcccagagcggaagattgcggtgactgggacgac

SEQ ID NO: 1172 - RNA, 174 nt, synthetic construct
  source 1..174: mol_type = other RNA
gcataagttgtcagtccccagcagtgtttgggagccttaacaggcttgctaagtgcctgagattaaaggcgaagaggaagaagagcaagaagggcaacccggtgtttaacacacggctttcaggcgctctcaggtttcattttcctttggaatttctgctttacagacagaaca

SEQ ID NO: 1173 - RNA, 174 nt, synthetic construct
  source 1..174: mol_type = other RNA
gcatcctttcaatgacctgttttcttctgtaaccacaggttcggtggtgagaggaagcctcgcagaatccagcagaatcctcacagaatccagcagcagctctgctggggacatggtccatggtgcaacccacagcaaagccctgacctgacctcctgatgctcaggagaagcc

SEQ ID NO: 1174 - RNA, 174 nt, synthetic construct
  source 1..174: mol_type = other RNA
gcatgcgcactgggcgtccccacgccaccgcccatcagctgagaattgcagctgagggctccggggtaggtgggtgacggcggtcggaggtgtaggagggagccgtggaggtccaggtgactgcttagaaaactgcacagcatctgatgaaattagcgaataagaacatcaacc

SEQ ID NO: 1175 - RNA, 174 nt, synthetic construct
  source 1..174: mol_type = other RNA
gcatttgcaacactgagaagttatcttaagggaggctgggccccattctactcatctggcccagaaagtgaacaccttgggggccactaaggcagccctgctaggggagacgctccaacctgtcttctctctgtctcctggcagctctcttggcctcctagtttctacctaatc

SEQ ID NO: 1176 - RNA, 174 nt, synthetic construct
  source 1..174: mol_type = other RNA
gccaaacatctattaggcaaaattggcctcttgcccatgatttgactttccagcacagccagttctttttctcctctgcagctgattggctctggagtgtggccagaagcctctctcctgcaattaaaggagtcgggtctctaactgttgatctgtttttttcccttctgagca

SEQ ID NO: 1177 - RNA, 174 nt, synthetic construct
  source 1..174: mol_type = other RNA
gcccactttactgttttggctccagactgtcgttaagaatgtacagcctaattctggtgtgtttcgggatattcttctgtccagtattctggaagggcggggaggcatggcagcgttttacttgacgttgatggtgctgtgaagtccattctttcctctgcaagactactgact

SEQ ID NO: 1178 - RNA, 174 nt, synthetic construct
  source 1..174: mol_type = other RNA
gcccatggctgagacctctctcccagagctggggggagaggacaaagccacgccttgccccagcatcctggagctggaggagctcctgcgggcagggaagtcttcttgcagccgtgtggacgaagtttggcccaaccttttcataggagatgcagctggtccttactccctgcc

SEQ ID NO: 1179 - RNA, 174 nt, synthetic construct
  source 1..174: mol_type = other RNA
gcccccgccccctactcccttccctcaggccccaggaagttgcaagagtaccatttgtcgcacactcggggaccgcgggtggccggaggagatgaaaccgtcttggctgcagtgtcgtaaagtcaccagcgccggggggctcggagggcccttgcctgggtcctctccggcccg

SEQ ID NO: 1180 - RNA, 174 nt, synthetic construct
  source 1..174: mol_type = other RNA
gcccgcggtgcggtgcggagactccatgaggccctggacatgaacaagctgagtggaggcggcgggcgcaggactcgggtggaagggggccagcttgggggcgaggagtggacccgccacgggagctttgtcaataagcccacgcggggctggctgcatcccaacgacaaagtc

SEQ ID NO: 1181 - RNA, 174 nt, synthetic construct
  source 1..174: mol_type = other RNA
gcccgcggtgggccgacttcccctcctcttccctctctccttcctttagcccgctggcgccggacacgctgcgcctcatctcttggggcgttcttccccgttggccaaccgtcgcatcccgtgcaactttggggtagtggccgtttagtgttgaatgttccccaccgagagcgc

SEQ ID NO: 1182 - RNA, 174 nt, synthetic construct
  source 1..174: mol_type = other RNA
gcccggccacgcgcaagccgcagggcaccctcatactactacttctgccttattacccttaaaactggagtctcagttatttgtatcccactattggtttttttttaaatcttttttcgtgggtttgcccccttttcctcagctgcgtttctgtcttcagtcctgtagggcaca

SEQ ID NO: 1183 - RNA, 174 nt, synthetic construct
  source 1..174: mol_type = other RNA
gccctgggggatttttttcttctatgcctctctggtggaatgacatttgctgtgtaggcatctttcctctgactgtatttcttggccttgaagagtactgagtttaaaaagacagtatgtgacagtccatggaaattgcctcttctgtgaaatctcgccacctgctccgaagac

SEQ ID NO: 1184 - RNA, 174 nt, synthetic construct
  source 1..174: mol_type = other RNA
gccgaagcggcgggatgagcggagccggcgtgggcggggcgtccgaggagagccaggccatgcaggcccacgtgtctattatcctcccagtccacaacgctgaaccgtggctggacgaatgtttgaggtctgttttgcaacaggactttgaaggtaccatggagctgtctgttt

SEQ ID NO: 1185 - RNA, 174 nt, synthetic construct
  source 1..174: mol_type = other RNA
gccgacttggaaatgtgaacgcaagaagcaggcttgatttttttttctccccccttctctctctctctctctctctctcttcctctctccctctttctcctctctcacccacactcacgcacacctccaaaccgcacacccagacgcacacgcataccccagcgcccggcagtt

SEQ ID NO: 1186 - RNA, 174 nt, synthetic construct
  source 1..174: mol_type = other RNA
gccgcaggcgcgctaggagaactatgccatttttgggtcaggactggagatctcctggatggagttggattaagacagaagatggctggaagagatgtgaatcttgtagtcagaaacttgaaagagagaataaccgttgtaacatcagtcacagcattatcttaaatagtgaag

SEQ ID NO: 1187 - RNA, 174 nt, synthetic construct
  source 1..174: mol_type = other RNA
gccgccatattgaataagcgacccggcctcctagggggtcgtcgtggtccagacagtttagcagaacagcctccgcggctccggggagaagcaatatgttaaggatacctgtaagaaaggccttagtaggcctttctaagtctcctaaaggatgtggcttgtgagaaggttggc

SEQ ID NO: 1188 - RNA, 174 nt, synthetic construct
  source 1..174: mol_type = other RNA
gcctctggggttttatattgctctggtattcatgccaaagacacaccagccctcagtcactgggagaagaacctctcataccctcggtgctccagtccccagctcactcagccacacacaccatgtgtgaagaggagaccaccgcgctcgtgtgtgacaatggctctggcctgt

SEQ ID NO: 1189 - RNA, 174 nt, synthetic construct
  source 1..174: mol_type = other RNA
gcctgtgctgtgcctgcctcctagagctcattccctacgccccgactctgtcctggacagcgtgcccaccagccatggcggggccccggggcctcctcccactctgcctcctggccttctgcctggcaggcttcagcttcgtcagggggcaggtgctgttcaaaggctgtgatg

SEQ ID NO: 1190 - RNA, 174 nt, synthetic construct
  source 1..174: mol_type = other RNA
gccttccatccctgctcctgcaccggtctgcatctcccagcagaaggcgcagccatgaatccgttattcggccccaacctcttcctcctgcagcaggagcagcagggcctggccgggccactgggggactcactgggaggcgaccacttcgccgggggaggagacttgcccccg

SEQ ID NO: 1191 - RNA, 174 nt, synthetic construct
  source 1..174: mol_type = other RNA
gcgaaaggggagctgttggaattcaaatagactttctggttcccagcagtcggcagtaatagaatgctttcaggaagatgacagaatcaggagaaagatgctgttttgcactatcttgatttgttacagcagccaacttattggcatgatggagtgacaggaaaaacagctggc

SEQ ID NO: 1192 - RNA, 174 nt, synthetic construct
  source 1..174: mol_type = other RNA
gcgaggggaccctgtggggcttgggacgagagacgggggtctttccgtgggaaccgagctaggtgccgggcaagagacgcgcggctggcccacctggatcctggccaactcgggattgagttcgttcctggtctcagaaggcccgttttgctttcagggaggagcttgtgaaaa

SEQ ID NO: 1193 - RNA, 174 nt, synthetic construct
  source 1..174: mol_type = other RNA
gcgcactcagggtctgaggcagctagtagccggagggtcaccatgaagttcaatcccttcgttacctgggaccgcagtaaaaaccgcaaacgtcacttcaatgccccctcacacgtgcgcaggaagatcatgtcatccccgctctccaaggagctgcggcagaagtacaatgtc

SEQ ID NO: 1194 - RNA, 174 nt, synthetic construct
  source 1..174: mol_type = other RNA
gcgccagcttggagagccagccccatcggggttccccgccgccggaagcggaaatagcaccgggcgccgccacagtagctgtaactgccaccgcgatgccgaaggcgcccaagcagcagccgccggagcccgagtggatcggggacggagagagcacgagcccatcagacaaag

SEQ ID NO: 1195 - RNA, 174 nt, synthetic construct
  source 1..174: mol_type = other RNA
gcgccctgcagataagagccccaggccctgcagtcaactctgggaggccgtgggctggactttcaggctgaacccaccccacatttctccctcgggaatctgattaaggcagtgattcttcattgcctgccctcctgtccacactcctgcctactgccacccacaagggtcatc

SEQ ID NO: 1196 - RNA, 174 nt, synthetic construct
  source 1..174: mol_type = other RNA
gcgggggcggggcacctctgtgcagggttcccagtcaccgcgacgctcctcgggaagccatagggcgcctcccagcccgtctccccgctccagtttagaacctaattcccaattccgggaccgggcccagccctgggctcttactgtccgcttttgctgggacctgttccacaa

SEQ ID NO: 1197 - RNA, 174 nt, synthetic construct
  source 1..174: mol_type = other RNA
gcggtcttttcctcccactcttggctggttggaccccgctatggaaaagttggcccctgagccagagctccagcagccttgttagggcgtggcctgaggcttggataagtgggatgtaaaacgaagatcaggagcagatttgaagaattacaaagtgaattggtgccagtcagc

SEQ ID NO: 1198 - RNA, 174 nt, synthetic construct
  source 1..174: mol_type = other RNA
gctcctgcgcgctgaggctccggcggacctctggtggacatggctgcttcccgcttacccccagcgacgctaacgttaaagcagttcgtaagaaggcaacaagttcttctcctctacagaaggattttgcaaacaattcggcaagttccaaatgattctgatcgcaaatacctg

SEQ ID NO: 1199 - RNA, 174 nt, synthetic construct
  source 1..174: mol_type = other RNA
gctctgaaagtgttccagctgaaatttcagatcggacagactcgctgcggctccggaggcagtgattccaagctgctcgcgcacgctgctgccaagctgcaggatggtgcacgtagccaggctgctgctgctgctcctcactttcttcctccgcacggatgctgagacacctcc

SEQ ID NO: 1200 - RNA, 174 nt, synthetic construct
  source 1..174: mol_type = other RNA
gctcttagtcgcgggccgactggtgtttatccgtcactcgccgaggttccttgggtcatggtgccagcctgactgagaagaggacgctcccgggagacgaatgaggaaccacctcctcctactgttcaagtacaggggcctggtccgcaaagggaagaaaagcaaaagacgaaa

SEQ ID NO: 1201 - RNA, 174 nt, synthetic construct
  source 1..174: mol_type = other RNA
gctgaccacaggagccggtgctggggactgagggaaacttagagttcagagagggggtgtgatttgcctgaggtcacacagcaagttagagacccagctccacgactcattgtcttggctttggccctcgtcatcctgcccacccagcggggcttcccaacccaccacacagcc

SEQ ID NO: 1202 - RNA, 174 nt, synthetic construct
  source 1..174: mol_type = other RNA
gctgactgccactaccagccggagccagggcctggtcgagacaactatttttgaggtatctgaggctaccccacagcactctctggcattggcaagactcgtggctgtgacccatgggcctctgaggaggcgttgtaagtccgcccagctccccacttgctgtgctctcactca

SEQ ID NO: 1203 - RNA, 174 nt, synthetic construct
  source 1..174: mol_type = other RNA
gctgagccatgacccatgaaccatggaagcttgactctagattgaccatcttgagatgccaaagatgtccacgtcctaatcccatgtgggagacagaataatggccctgcagaccttcccagctggccatgacccctcatttgaccagctcttcccttctctctgaccagcacc

SEQ ID NO: 1204 - RNA, 174 nt, synthetic construct
  source 1..174: mol_type = other RNA
gctgtgagggttactatgctccctctttgccgccgtctcctcctcttgcccgcgcaggcacccctctggctgctcagtcctgcctcagtgtcaaaccagaagagaagtaaaattcaacaaaaatttatgtgtggagttccttcttaaaagaagaaaaaagtgattatttagact

SEQ ID NO: 1205 - RNA, 174 nt, synthetic construct
  source 1..174: mol_type = other RNA
gcttaggagcacccaccaagctctggcagggtctccagcacccatctcgggcagaggctgggggagtgactgctggtgcaagccccaaagtgcatgcggcaaaaacatggatgcagagctggtggcaagaagaggggctaagttatagagtcaacgtggaggtaccaggccacc

SEQ ID NO: 1206 - RNA, 174 nt, synthetic construct
  source 1..174: mol_type = other RNA
gcttccgtagaggccagctggttgctacgcagcaacaggaaacattccgcgctaccgagtactttctactcccgaccaggcattgctctctctggagaccctcggcggtggttgctgtattttgacttggagtaaggatgacttttcgggccacagatagtgaatttgacctga

SEQ ID NO: 1207 - RNA, 174 nt, synthetic construct
  source 1..174: mol_type = other RNA
gcttgggtaggggccaggctagcctgagtgcacccagatgcgcttctgtcagctctccctagtgcttcaaccactgctctccctgctctactttttttgctccagctcagggatgggggtgggcagggaaatcctgccaccctcacttctccccttcccatctccaggggggcc

SEQ ID NO: 1208 - RNA, 174 nt, synthetic construct
  source 1..174: mol_type = other RNA
gctttccttttagcttttgtaagttacacgtcaaaatggccgatctgacatcggtgctcacttctgttatgttttctccctctagtaaaatgtttatcggtggactgagctggcagacctcaccagatagccttagagactattttagcaaatttggagaaattagagaatgta

SEQ ID NO: 1209 - RNA, 174 nt, synthetic construct
  source 1..174: mol_type = other RNA
ggaaccgccctgctgccgccgcctgcttcctctgctcgcggttagcccgtcagtccctgctctgtgcgcgcctccatctgggccatggatggcggggatctgatgagcttctttcttctggcatcattaacggaccttttaccatgaatagttctactccttctacaggtgtgt

SEQ ID NO: 1210 - RNA, 174 nt, synthetic construct
  source 1..174: mol_type = other RNA
ggaaggaggctgagtgactactggactggatattgactctaactcttgtttccaagcttatatcctcaatcacctaaagatcagagtgtgaagaaacaaacctgtgacagatctgtggttgaggtttagactgggggaggagtatagtactggactttctttgtaacttgtacc

SEQ ID NO: 1211 - RNA, 174 nt, synthetic construct
  source 1..174: mol_type = other RNA
ggaaggcagagctgcaatctagttaactacctcctttcccctagatttcctttcattctgctcaagtcttcgcctgtgtccgatccctatctactttctctcctcttgtaggcaagcctcagactccaggcttgagctaggttttgtttttctcctggtgagaattcgaagacc

SEQ ID NO: 1212 - RNA, 174 nt, synthetic construct
  source 1..174: mol_type = other RNA
ggaagtagggcctgatgtaaacacccgagccgggctccaaggcccgggaggtcagaaaaccgggccgcgggcggcaccgacagctggggcccgggtcagggacacgcggaggtcaggccggtgaaggcggcaggaagctggagcacgatcccaggaggaacaatcctgcaccat

SEQ ID NO: 1213 - RNA, 174 nt, synthetic construct
  source 1..174: mol_type = other RNA
ggaagtgccgaatggggaccaagatggcggaccttgattcgcctccgaagctgtcaggggtgcagcagccgtctgagggggtgggaggtggccgctgctccgaaatctccgctgagctcattcgctccctgacagagctgcaggagctggaggctgtatacgaacggctctgcg

SEQ ID NO: 1214 - RNA, 174 nt, synthetic construct
  source 1..174: mol_type = other RNA
ggaagtggctctcagggcgcttccggggaccaggcccgcttttggctgcatcagccggggattgccggcgccaggcatctgcatctgggaccgacctcctgggctggctgatcaaagaggaagcagcagcaatgtctgctgtgggggctgcaactccatacctgcatcatcctg

SEQ ID NO: 1215 - RNA, 174 nt, synthetic construct
  source 1..174: mol_type = other RNA
ggaatacctaggcctccagactactccccctaactcatatttagattcctgaagcttctgcacatgtagttcctagagctgctgcttattaaaatgtcaacatcttcatcttctagctgggacaacctcttagagtctctctctctcagcacagtatggaattggatacaagca

SEQ ID NO: 1216 - RNA, 174 nt, synthetic construct
  source 1..174: mol_type = other RNA
ggaccggtgtgctaggagatgatcggggaaagcatagtcccctgtctgtggcaccagacactcccgactgtgcgctgactctccccgcccagccagcagccttttccagagaggctgtggtccatagcctctgttcgttttcactgcaggaccaggcacgaaagttaaaacaaa

SEQ ID NO: 1217 - RNA, 174 nt, synthetic construct
  source 1..174: mol_type = other RNA
ggagcccggttaggaagaatggagttggcgactcgctaccagagcacttcgcaggcatagtttggaagtcatcagggctggttcttttccttccagatccctaaagaagtggctgacatctttaacgcccccagtgatgatgaagagtttgttggcttccgagatgatgttccc

SEQ ID NO: 1218 - RNA, 174 nt, synthetic construct
  source 1..174: mol_type = other RNA
ggagccgtccgcctacgggggccgggacgtcgcctgcgcgtctctcgttttcggacggctgcagcatcgcggtggggatcgaaagcgggggcttctgggacgcagctctggagacgcggcctcggaccagccatttcggtgtagaagtggcagcacggcagactggtcaaacaa

SEQ ID NO: 1219 - RNA, 174 nt, synthetic construct
  source 1..174: mol_type = other RNA
ggagcctcatctcctcggtgtctgcgagattaatctctcatggccgctgcacaagaacctggcttttagctgaactaaggagaaagtcctacaacagtttggcgtgcaacatggggcttgagaaaggatgaggacggggacttggttgccttttccagtgacgaggaattgaca

SEQ ID NO: 1220 - RNA, 174 nt, synthetic construct
  source 1..174: mol_type = other RNA
ggagctttctattggtcctgggtaccgagcatgggcgctgcgtcagtgcgcgctggcgcaaggttggtggaagtcgcgttgtgcaggttcgtgcccggctggcgcggcgtggtttcactgttacatgccttgaagtgatgaggaggtttctgttactatatgctacacagcagg

SEQ ID NO: 1221 - RNA, 174 nt, synthetic construct
  source 1..174: mol_type = other RNA
ggcagaaaactaactgaaaaacgagaacctactgtatggttagtaatttcttccatgtcatacaagtattcgagaaatctgctaccttgattagtaagactgaacacattggttttgtcatttattcatggaggaagtccaccacccacttggggagcagaaggaaatttgcca

SEQ ID NO: 1222 - RNA, 174 nt, synthetic construct
  source 1..174: mol_type = other RNA
ggcatagcaagatggcctgccctcaggtacaggaagaaggaatggaatcggaaggaagaaaattcattccagagacaaaatagctcccctcctctgttgtagctgttcctctggcaatacaaactttctgctttcaggttctgcagcattccagaccttgagcactgaatcagg

SEQ ID NO: 1223 - RNA, 174 nt, synthetic construct
  source 1..174: mol_type = other RNA
ggccacagtgcgcatgtgtgcggctgtgctttggctcttcgggtaaagatggcggagcgcgggtacagcttttcgctgactacattcagcccgtctggtaaacttgtccagattgaatatgctttggctgctgtagctggaggagccccgtccgtgggaattaaagctgcaaat

SEQ ID NO: 1224 - RNA, 174 nt, synthetic construct
  source 1..174: mol_type = other RNA
ggccagaaaagccaaacttaagaaatctgcctatgtacagaacaagtcaactaaggggttctcattaatctaccgtctgtgaatatcgttatttttcaggagaagcgctacaaagcagccactgtgcttactgaacggcctccccctgtatcgcttaattgagaaggtatacaa

SEQ ID NO: 1225 - RNA, 174 nt, synthetic construct
  source 1..174: mol_type = other RNA
ggccccaggcagctggggtattccttaggggctgagtctcctggtatccctaagactgggcttggcttaggcactgaggactttttcctggccattatcctgcaggacagcagcgcagattccttctggaaccccaacgccttcgagacggattccgacctgccggctggatgg

SEQ ID NO: 1226 - RNA, 174 nt, synthetic construct
  source 1..174: mol_type = other RNA
ggcgaggagaggcacaccactattgttttaatttgcttttacctgattcctggcagacttctgcgttatgacccggctgctgggctacgtggaccccctggatcccagctttgtggctgccgtcatcaccatcaccttcaatccgctctactggaatgtggttgcacgatggga

SEQ ID NO: 1227 - RNA, 174 nt, synthetic construct
  source 1..174: mol_type = other RNA
ggcggaggtggggttagcttcagttgaccaaccatgccttgaggataaattggatgggatcagatgggaagatgtgacaagaagagaaatcctcctctatataggatgctctgctgtttcctaaggattttcagcaccttgccccaaaatcaaaatgatgcttcaacacccagg

SEQ ID NO: 1228 - RNA, 174 nt, synthetic construct
  source 1..174: mol_type = other RNA
ggcggcgcaggggcggggctttacggacgcaagcacgtcgaagcgctgctcctggagccgcggagggtgcgggtttggctgcggtggtttctgtggcggttgctgtggcggagtttggaggttggagagaaatccaggtactcactagactggtaccttctgccaccatggggg

SEQ ID NO: 1229 - RNA, 174 nt, synthetic construct
  source 1..174: mol_type = other RNA
ggcggggagaagccgagctgagcggatcctcacacgactgtgatccgattctttccagcggcttctgcaaccaagcgggtcttacccccggtcctccgcgtctccagtcctcgcacctggaaccccaacgtccccgagagtccccgaatccccgctcccaggctacctaagagg

SEQ ID NO: 1230 - RNA, 174 nt, synthetic construct
  source 1..174: mol_type = other RNA
ggcggttggtgcggcctccattgttcgtgttttaaggcgccatgaggggtgacagaggccgtggtcgtggtgggcgctttggttccagaggaggcccaggaggagggttcaggccctttgtaccacatatcccatttgacttctatttgttgtttacttctggtttagtgtgaa

SEQ ID NO: 1231 - RNA, 174 nt, synthetic construct
  source 1..174: mol_type = other RNA
ggctaccatggtaacaggttccagggtaacagaggagggagctgggtcctgtttactcccagtcctgccgatgaggattctgaccgtagacactgaattgtcccgtacctatccgtgctctttctgtgttctcaccagggctgagctcgaactgccacctctgccagcaggacc

SEQ ID NO: 1232 - RNA, 174 nt, synthetic construct
  source 1..174: mol_type = other RNA
ggctctcaggaggtccttgttccagggaacagctgcttctctggggctgggctctactccctgcagcccctcgcactacccagctggaaccagggacaacgcctgagtccaaccctcgtgtctattttccagaaaacgggcaatgctgtgagagccattggaagactgtcctct

SEQ ID NO: 1233 - RNA, 174 nt, synthetic construct
  source 1..174: mol_type = other RNA
ggctgccagcttcctttcggcccctgcttttgtgctccctccgctcccaaactgtacctgtcacagaccaggaaaaatgtttgctgtgctgcgtctgttggcgagtcccctcctcacccggttcccttcctctgcatcctttcctcagcttgagaaacacctctttgccccgtc

SEQ ID NO: 1234 - RNA, 174 nt, synthetic construct
  source 1..174: mol_type = other RNA
ggctgcggccccggctccggcccccgcaggagcagcaccccccggggaaagacattttctgctcccaccgagttggcagggcctgcttcctgaatctcctgggtgtgtcttaactgccagtcccagcacctcctgaaagccccactctcctccagtggtcacagtggaaggatc

SEQ ID NO: 1235 - RNA, 174 nt, synthetic construct
  source 1..174: mol_type = other RNA
ggcttccgggatgtggcggggcctttgtctctggctgcagttggagctctgcgtctcgtcttcgttcttctgtgtcctctgctgctagaggtccagcctctgtggctctgtgacctgcgggtattgggggatccacagctaagacgccaggaccccccggaagcctagaaatgg

SEQ ID NO: 1236 - RNA, 174 nt, synthetic construct
  source 1..174: mol_type = other RNA
ggcttttagctggcttgtctgtcataattcatgattcggggctgggaaaaagaccaacagcctacgtgccaaaaaaggggcagagtttgatggagttgggtggacttttctatgccatttgcctccacacctagaggataagcacttttgcagacattcagtgcaagggagatc

SEQ ID NO: 1237 - RNA, 174 nt, synthetic construct
  source 1..174: mol_type = other RNA
gggacaaggcgtcggttctcgcctgagggccaaaccttgcccctgcccaccttcctcacccccgccatttccaggactcacatccaaaggcgacagcaccaggatttgctcccgcctttggcacagaggaggacgggtccctctctcagcctggccagtctttcccagggcttg

SEQ ID NO: 1238 - RNA, 174 nt, synthetic construct
  source 1..174: mol_type = other RNA
gggagtgcgagccacaggccaggcactctccttctcccattagctcagccgtggcatcggacttgcagcttcattttgggctgccttagccatgaagctccttttgctgactttgactgtgctgctgctcttatcccagctgactccaggtggcacccaaagatgctggaatct

SEQ ID NO: 1239 - RNA, 174 nt, synthetic construct
  source 1..174: mol_type = other RNA
gggataaacggagctggacgactcagtctcttggtctgtggctgctgcggttacctggatgggcgagcacctctgaggctggctttgttacctgggcaataagggactagcagttcagccgttttctatgcctgctggatttgtttgtatttgttcccagccactgctcatgta

SEQ ID NO: 1240 - RNA, 174 nt, synthetic construct
  source 1..174: mol_type = other RNA
gggcacgagggcagagccagttcctagcgcagagccgcgcccgccatgagggagatcgtgcacatccaggcgggccagtgcgggaaccagatcggcaccaagttttgggaagtgatcagcgatgagcacggcatcgacccggccggaggctacgtgggagactcggcgctgcag

SEQ ID NO: 1241 - RNA, 174 nt, synthetic construct
  source 1..174: mol_type = other RNA
gggcacttggagttgtcttaggactgatgtctgaattaactaaatgaacttgtctggtttgcagagtgctgatggcagagattggtgaggatttggataaatctgatgtgtcctcattaattttcctcatgaaggattacatgggccgaggcaagataagcaaggagaagagtt

SEQ ID NO: 1242 - RNA, 174 nt, synthetic construct
  source 1..174: mol_type = other RNA
gggctctccggcagcggatctgcgcagaagcgttccgtgcgtgcaagtgctgcgaaccacgtgggtcccgggcgcgtttcgggtgctggcggctgcagccggagttcaaacctaagcagctggaaggaaccatggccaactgtgagcgtaccttcattgcgatcaaaccagatg

SEQ ID NO: 1243 - RNA, 174 nt, synthetic construct
  source 1..174: mol_type = other RNA
gggctggagacgggacccgacggtgactgcgcaagcaaggaatagtgtctggagccggtccagctgaaggaagggtgagcagagagtgcaagcaggacccttgtcggtgggtgaacattttgctccaaaagggatccttggccctgcgcaggtggatttcagtgtgttctttgg

SEQ ID NO: 1244 - RNA, 174 nt, synthetic construct
  source 1..174: mol_type = other RNA
ggggagggaggcggttagcgggctttagcgccttttctggcggcggtagatttgaagcgcttcaaaggaccggacccagagaagaggaaaactctaccggtgcaggagcacagggatcagttgtccttgtttttttttggtcttttcttcatttgaagattaagtattggagcc

SEQ ID NO: 1245 - RNA, 174 nt, synthetic construct
  source 1..174: mol_type = other RNA
ggggccgcgacctcggctcgagaaggtgctttagtctgaagatggcggcctcagcagcgagaggtgctgcggcgctgcgtagaagtatcaatcagccggttgcttttgtgagaagaattccttggactgcggcgtcgagtcagctgaaagaacactttgcacagttcggccatg

SEQ ID NO: 1246 - RNA, 174 nt, synthetic construct
  source 1..174: mol_type = other RNA
gggggaggggcggtcctaggaggagcaggagcctggtgctttctatcagggagggatcacaccggctcactgctgagccggccaggcagacacaggcttgggctctgctgggcatcatacttgtcactgggtaaacagtttgcccacttaccgcaggatgaagctgcttgccag

SEQ ID NO: 1247 - RNA, 174 nt, synthetic construct
  source 1..174: mol_type = other RNA
ggggggccatagttctccctgattgagacttgcctgctgctgtgaccactggtcttgtcctcttctccagcatggtgtgtctgaagctccctggaggctcctgtatggcagcgctgacagtgacattgacggtgctgagctccccactggctttggctggggacacccaaccac

SEQ ID NO: 1248 - RNA, 174 nt, synthetic construct
  source 1..174: mol_type = other RNA
ggggggcttgtgggtcctcctccccctcccactgacaactgccccaactgctcttcccgccccggtcacagtgaaaatgtagacggggtcgttgtccactatgttaggtcttaatggtgggaggacgcccgagtgctcggcccgtttcaccccgaggaggaaggacactgggtc

SEQ ID NO: 1249 - RNA, 174 nt, synthetic construct
  source 1..174: mol_type = other RNA
ggggtctcaagtaggaggcctccccatcacccccaccccagccccccaccacccccggcctaagcagctaccatggcccaggtggccggcgcggcgttgtcccaggcgggttggtatctttcagatgaaggcattgaagcttgcacaagctctccagacaaagtcaatgtaaat

SEQ ID NO: 1250 - RNA, 174 nt, synthetic construct
  source 1..174: mol_type = other RNA
gggtacaaatgtattttggatcaaagaaactccagtattcaaagataggaactgacaggattttaggtcactttgtaggtcaccacctagaggggaggaagacctcgctttggagagtgggaataaaacgctcgtggaaaagggtacacgcttttctgggaaagtgaggccacc

SEQ ID NO: 1251 - RNA, 174 nt, synthetic construct
  source 1..174: mol_type = other RNA
ggtatgagagcttccagggagacccgccaagatctccaggcaggccgggccaggctctctgggattccggactggcttcgcccaactggaaccccctcgatgagggggccccaggcagaccttatatgagcatcccagccatcactcttccacctgctccttagagaagggaag

SEQ ID NO: 1252 - RNA, 174 nt, synthetic construct
  source 1..174: mol_type = other RNA
ggtcgcggctgtggccgggggaagtgaatggttttacccagagggccctgcgccgcctttctccgctggcaacggcgccgctccccgctcctcctccccagccatggcgttcacgttcgcggccttctgctacatgctggcgctgctgctcactgccgcgctcatcttcttcgc

SEQ ID NO: 1253 - RNA, 174 nt, synthetic construct
  source 1..174: mol_type = other RNA
ggtctcagggttgaagagggggaggcctcagacttctcgctggcctgggattcctccgtgacagcagcaggaggcctagaaggagagccagagtgcgatcagaaaaccagccgtgcgctggaagacaggaacagcgtgacaagtcaagaggagagaaatgaggatgatgaagac

SEQ ID NO: 1254 - RNA, 174 nt, synthetic construct
  source 1..174: mol_type = other RNA
ggtgagtggcccctgctggaccgtggatcccgggcgggcgtgcgggcggcagcgtacgaggccttctactcgcccgggtgtccggtgcctcgcttctccctgggaccctgtcgtcaacatcgaggcctgccagtgagcttctaccatcatggacctattgttcgggcgccggaa

SEQ ID NO: 1255 - RNA, 174 nt, synthetic construct
  source 1..174: mol_type = other RNA
ggttctagctgatcatgtgacaatccaagatggcggtgcccggcgaggcggaggaggaggcgacagtttacctggtagtgagcggtatcccctccgtgttgcgctcggcccatttacggagctattttagccagttccgagaagagcgcggcggtggcttcctctgtttccact

SEQ ID NO: 1256 - RNA, 174 nt, synthetic construct
  source 1..174: mol_type = other RNA
ggttgacccaactgctgctctagaaacttctcctcccgctcctttgggggctacctgtactacccaggctcctaccccagcagcctggtctacagcactgccctctgctctcccagcacctgccagctgcgttcctctctctacagggactgtcagaagacctgctgggagccc

SEQ ID NO: 1257 - RNA, 174 nt, synthetic construct
  source 1..174: mol_type = other RNA
ggtttcattgtgttggccaggctggtctcgaactcctgacctcgtgatccgcccgccttggcctcccaaagtgctaggattacaagtgtgagccaccgcgtccggcctttcaaatggtatttttgattttcctcttccagtccttaaagcagctgatttagaagaatacaaatc

SEQ ID NO: 1258 - RNA, 174 nt, synthetic construct
  source 1..174: mol_type = other RNA
ggtttgtaggagtcctgaagtgagaaaggttctgatgtaggctctttctgggtgccagcattattaaagtattgtttatagttttcacttttccttcccaacactggagcaacattcaaaagcccattccccaggaaaaccctccctttcctttgcccacagttccaagatgag

SEQ ID NO: 1259 - RNA, 174 nt, synthetic construct
  source 1..174: mol_type = other RNA
gtacttcatagactttatcatacttcgtagcatccagtatgttttctttgctaagattattgattttgtattgaagggtcccatgtccatcgttttcaatgctttatctccagggttggagcatgcctgctgtggcagaggtaaaacttcgagatgatcaatatacactggaac

SEQ ID NO: 1260 - RNA, 174 nt, synthetic construct
  source 1..174: mol_type = other RNA
gtagaggcggaagttgaggggactgacgcagatgggggaattttgcctcgatggcactttcctgtccgcgactccgcccccaccagaggggctaggctctgggattcaagatggaggcgctgagtcgagctgggcaggagatgagcctagcggccctgaagcaacacgacccct

SEQ ID NO: 1261 - RNA, 174 nt, synthetic construct
  source 1..174: mol_type = other RNA
gtagcgcggtccccatacggctgtaatcagtgaattagaaaaaaaacaccctagcagcgatattctatgatagattttttttcctctgcgctcgcctttttcctaggccttgcccccccaaagcccctccaaaagagggaactttttctctgagggggctccaaggagaaggcc

SEQ ID NO: 1262 - RNA, 174 nt, synthetic construct
  source 1..174: mol_type = other RNA
gtagttcttctcgatcgtgtcagtttgtaaggcgagggcggaagttggattcctggcctgagaatattaggcgtagttttccagtttttggcaaagcggaaatacttaaggcccctgggttgactgggttctttgttttatctaccggcttctgctttacgacaggtcacaaac

SEQ ID NO: 1263 - RNA, 174 nt, synthetic construct
  source 1..174: mol_type = other RNA
gtatgaggatggtagaagctctcgtcgaaccagatggatgaagaccactaacggcttttgtttcctctggtaacagcaagagacagagcgacatgagagattggaccgcgggctgcactggagaatttactggtaggataattcatccctaaagagattgaagtgagcttcaga

SEQ ID NO: 1264 - RNA, 174 nt, synthetic construct
  source 1..174: mol_type = other RNA
gtattgatgtcaagctgaaccatcgtaggaagttgaaagccttagaaagaggacttggtaaagtttttggattatcttgaaactctggcaagatggccaagtatggagaacatgaagccagtcctgacaatgggcagaacgaattcagtgatatcattaagtccagatctgatg

SEQ ID NO: 1265 - RNA, 174 nt, synthetic construct
  source 1..174: mol_type = other RNA
gtcaactacagctgttctccttcttttcccagtatcctttgggtgcagtgagacaccaggagagctgctgctttgggggatggacaggggcagcaggaatgcctttgtgttttcgcagtgaacctccttggcctgggcgaagctgtgtggaccaagcaagtcaggagtgtggcc

SEQ ID NO: 1266 - RNA, 174 nt, synthetic construct
  source 1..174: mol_type = other RNA
gtccttcccacccttagtcccaggcatctgactaccgggaacctcagccagagtccgggagccccccaccccgtccaggagccaacagagcccccgtcttgctggcgtgagaatacattgctctcctttggttgaatcagctgtccctcttcgtgggaaaatgaaccagaagac

SEQ ID NO: 1267 - RNA, 174 nt, synthetic construct
  source 1..174: mol_type = other RNA
gtctcccggggattttgtatatattttttaacttccgtcagggctcccgcttcatatttccttttctttccctctctgttcctgcacccaagttctctctgtgtccccctcgcgggccccgcacctcgcgtcccggatcgctctgattccgcgactccttggccgccgctgcgc

SEQ ID NO: 1268 - RNA, 174 nt, synthetic construct
  source 1..174: mol_type = other RNA
gtctgacttgagtccctgctgctgcagtgcacgccccttcggcagccagggtggggcccagacccaacctggcccctcctgcccccaccccgcctttgggtcgctgacccccaggctgtggtgagggtctgagagctggtaccacggagcctgggcaacctcctccgcccaccc

SEQ ID NO: 1269 - RNA, 174 nt, synthetic construct
  source 1..174: mol_type = other RNA
gtctgcgtcagttggtcacgtggttgttcggagcgggcgagcggagttagcagggctttactgcagagcgcgccgggcactccagcgaccgtggggatcagcgtagtcttctgtgcttcaccatctacataatgaatcccagtatgaagcagaaacaagaagaaatcaaagaga

SEQ ID NO: 1270 - RNA, 174 nt, synthetic construct
  source 1..174: mol_type = other RNA
gtctggagccggtgctctgcggcggggcgggagggctcgcatccccatagtgctgggttacagtgaaggtacgccccgcgctctgctctggagaggcagggtgggatagggaacgtctcgagtggcgcccgcagtcatggtggtgttcgttggccgccgcctcccggcgctcct

SEQ ID NO: 1271 - RNA, 174 nt, synthetic construct
  source 1..174: mol_type = other RNA
gtctggcagctattttgctttaaccgatgacagaccgtggcaaggaggtgtacagccctgactttcatagcctcggaggagaaggtcttggtggccgacaagtctggagacgtctactccttttcggtgctggagccacacgggtgtggccgtctagagctggggcacctgtct

SEQ ID NO: 1272 - RNA, 174 nt, synthetic construct
  source 1..174: mol_type = other RNA
gtctttaaagggcaattgtcgacactctgcaaacataccgatttgttgtctgcccactttggagtcttcaatctgggcagtaactatttaccctttttcctgctagcctgtccccctctctggattgaagtcacctgctaagacaatggactaccgaccagactcccggaaatc

SEQ ID NO: 1273 - RNA, 174 nt, synthetic construct
  source 1..174: mol_type = other RNA
gtgatgctcggactagagcccaggcatttttaactcctgttccctcaccagcctgcaggaaatggaaaaggagtaaaagtccctcgcaatttccgactgttggaagaactcgaagaaggccagaaaggagtaggagatggcacagttagctggggtctagaagatgacgaagac

SEQ ID NO: 1274 - RNA, 174 nt, synthetic construct
  source 1..174: mol_type = other RNA
gtgcagaactgccagtcccctgacacgctgtgccccacccactgcagcccagtgctgaatgaaccctgcccagaggtgtctgtagtgagcttctgccctagtgacttttgagccggccaggttgcagcgcggacacactcgcaggtcgctgtggccccagcctcgcctgacaga

SEQ ID NO: 1275 - RNA, 174 nt, synthetic construct
  source 1..174: mol_type = other RNA
gtgcctggaaaggaattgttttggcctaggatcatccagctagacttcgggctccttgaggatattcagttttgtatgtttgaatatcctctcaccatgttcagcataaagtaccattcttaatgattatcctcaacaagacaggtgtgagagggttgctgttgtattgcaatc

SEQ ID NO: 1276 - RNA, 174 nt, synthetic construct
  source 1..174: mol_type = other RNA
gtgctgccctaggctgcatgagtcgaagcaagcgtgtttccttcccgccaggcaagtgcccttagaaaccgggccccgcccccttcctggcctgcattcccatcccctctcccggggcggaggtgaggacctccttggttcctttggttctgtcagtgagccccttccttggcc

SEQ ID NO: 1277 - RNA, 174 nt, synthetic construct
  source 1..174: mol_type = other RNA
gtgcttattaacttttctctcagtccctcactctgctgctcttctcgcctcatctcacataagggaaaactcaggctccaaaagcaaagtgattccaccaagatgacaatggaatcgggacctggtgtccaagcctggtcctcgcacgaggtagatactccctgagatgctggg

SEQ ID NO: 1278 - RNA, 174 nt, synthetic construct
  source 1..174: mol_type = other RNA
gtggaacctcataaaatctccaagaaacatcattcacccatactgactagtttcacatctctttgtttgaagaaaacaggtctgaaacaaggtcttacccccagctgcttctgaacacagtgactgccagatctccaaacatcaagtccagctttgtccgccaacctgtctgac

SEQ ID NO: 1279 - RNA, 174 nt, synthetic construct
  source 1..174: mol_type = other RNA
gtgggagagccgggctggagtcacagtttttattttgctagggaggtagtcagtggcgcacaaagggtaacaagcagtgatagtggggatgctttccattttaggaaacttttcctaaaaggaagtggcaattttaactaatctcccctccgccgctcccagctgccgctccag

SEQ ID NO: 1280 - RNA, 174 nt, synthetic construct
  source 1..174: mol_type = other RNA
gtgggggaaagtatggctgcgatgatggcatttcttaggacacctttggattaataatgaaaacaactactctctgagcagctgttcgaatcatctgatatttatactgaatgagttactgtaagtacgtattgacagaattacactgtactttcctctaggtgatctgtgaaa

SEQ ID NO: 1281 - RNA, 174 nt, synthetic construct
  source 1..174: mol_type = other RNA
gtggttctctctaacaatgctgctcaagcctgttttaaagttaatgtcagtaatttgatttgattgttccttccaggtgtctcaaaggctgttgagcacatcaataaaactattgcgcctgccctggttagcaagaaactgaacgtcacagaacaagagaagattgacaaactg

SEQ ID NO: 1282 - RNA, 174 nt, synthetic construct
  source 1..174: mol_type = other RNA
gtgtgtggaggggaccctgtggttagcagcagctatcgcagcgtcggatgttcagagcagcagaagccggcgtcgtcggatgttgtgttgcccgccaccatgagctacacaggctttgtccagggatctgaaaccactttgcagtcgacatactcggataccagcgctcagccc

SEQ ID NO: 1283 - RNA, 174 nt, synthetic construct
  source 1..174: mol_type = other RNA
gttaaaccaacaagccgatagaaaaaggtagttatcaagagatttttaaaacttcaaccctttttctcttatagttagtgaagagagtagaatatctccagttttggctgacatctctacaacctgaacaattggcttaaacttcacttgggattcccggttgcttgttttagc

SEQ ID NO: 1284 - RNA, 174 nt, synthetic construct
  source 1..174: mol_type = other RNA
gttatacacgagatcagagtctaattttatcttggcaaagaaaaagagaatttgaggactgggaattttccattcagggtaatatcaacaagctggtccactgagaggagagcaagcctgttgaaattgtttttgctttcacagctttttcctgtccggggagcaggagaagcc

SEQ ID NO: 1285 - RNA, 174 nt, synthetic construct
  source 1..174: mol_type = other RNA
gttattggttggcagttcagccaatgagcgggcctgttactagtttgcggcatcctgtggtataggggaagcgctccgggcctggaatccctacgcgtccctttgggtttagcacgatgagctcaatcggcactgggtatgacctgtcagcctctacattctctcctgacggaa

SEQ ID NO: 1286 - RNA, 174 nt, synthetic construct
  source 1..174: mol_type = other RNA
gtttgagcagcattgttagagcctgtggaaaacactttacaactgtgtaactgtcttcatctttacagaggaatagtctacaaaggaagacttgtaacctggagaagagacctgtcatttactccatcctttatagtgatgctacaggacgaagaggaatggataaaaacattg

SEQ ID NO: 1287 - RNA, 174 nt, synthetic construct
  source 1..174: mol_type = other RNA
gtttggctctgtttgagcaccccgggatgattggtggtggggtgtggctgaaggtgaattggaacagtgcactcagagccaggttgcaagagtgctgcatgctcctcagggattggctccggccaagtgccccagcctccttttctggagaattctgtttttgacttgggcccc

SEQ ID NO: 1288 - RNA, 174 nt, synthetic construct
  source 1..174: mol_type = other RNA
gtttggggccagagtgggcgaggcgcggaggtctggcctataaagtagtcgcggagacggggtgctggtttgcgtcgtagtctcctgcagcgtctggggtttccgttgcagtcctcggaaccaggacctcggcgtggcctagcgagttatggcgacgaaggccgtgtgcgtgct

SEQ ID NO: 1289 - RNA, 174 nt, synthetic construct
  source 1..174: mol_type = other RNA
taaaagggttagatttcagtctatagacgatcagtgggaaggcctttcctaggaggtaaccagaacagagagctgtaaactccgtgaatgcaagaggctgcttctgttacctgagtggttctcactcatctttgccttccttacctcgtgatctcaccattccagattgaaatc

SEQ ID NO: 1290 - RNA, 174 nt, synthetic construct
  source 1..174: mol_type = other RNA
taactgacgctaccgtcgcggccgccggcaagttcctttactgtgttttcttggttcagccttgaagtgagtcgtggacgatcctctctcagcgtccagcctagacggcggtgttgctccggcagcgttcctgggagccgagggccagagactaagttgtgggacgacttcagc

SEQ ID NO: 1291 - RNA, 174 nt, synthetic construct
  source 1..174: mol_type = other RNA
taaggcggcgtttctgggcgcagccgtgtcgctcctggtttccatcgtgtgggaagaacggagtaacgagtctcacgcagaaaaaggtcttgagagcaccttgtggcgcacccagtgtaactgtgacgatcaaccatttttgtgttgtcctcccccacctgccagaagccaacc

SEQ ID NO: 1292 - RNA, 174 nt, synthetic construct
  source 1..174: mol_type = other RNA
tacaggacttgacccaatgaaagaagcatatggcacttgtgaagataaatgttactcctccctttttaattggaacttctgcttaggacctgtgtatgacgtttcacctgtgatctgttctttcggtagccactgactttgagttacaggaaggtctccgaagatttgtgtcaa

SEQ ID NO: 1293 - RNA, 174 nt, synthetic construct
  source 1..174: mol_type = other RNA
tacatcttttagtgcgtatgttctgtccacccagctactggttcatttgagtagatcggagtcagatgagtacatgtttacgggaggcgcttggttacgggatccagataggaatctttatctgagctgcttgtcagtttgttcgtctgtccctaggtctgtctgctatcagct

SEQ ID NO: 1294 - RNA, 174 nt, synthetic construct
  source 1..174: mol_type = other RNA
tactaccacctcctttgcgggtaaacagacatggccggcgaaggagatcagcaggacgctgcgcacaacatgggcaaccacctgccgctcctgcctgagagtgaggaagaagatgaaatggaagttgaagaccaggatagtaaagaagccaaaaaaccaaacatcataaatttt

SEQ ID NO: 1295 - RNA, 174 nt, synthetic construct
  source 1..174: mol_type = other RNA
tagacggaacttcgcctttctctcggccttagcgccatttttttgggtgagtgttttttggttcctgcgttgggattccgtgtacaatccatagacatctgacctcggcacttagcatcatcacagcaaactaactgtagcctttctctctttccctgtagaaacctctgcgcc

SEQ ID NO: 1296 - RNA, 174 nt, synthetic construct
  source 1..174: mol_type = other RNA
tagacttgaatatgcctctgggcaaagaagcagagctaacgaggaaagggatttaaagagtttttcttgggtgtttgtcaaacttttattccctgtctgtgtgcagaggggattcaacttcaatttttctgcagtggctctgggtccagccccttacttaaagatctggaaagc

SEQ ID NO: 1297 - RNA, 174 nt, synthetic construct
  source 1..174: mol_type = other RNA
taggctagggtcattacatagataatttgcctgctgtgtaaataaaaatgaaattgtttaaattttgtgcaagagaaagtgaaaataaggagttacgatttgtttgttagagaaagtggaggccattggaatgacagtttttggaagtgtggagcagtttggctaagaatagga

SEQ ID NO: 1298 - RNA, 174 nt, synthetic construct
  source 1..174: mol_type = other RNA
tatagcaagcaagaagtggcagggcgcgcaccggctgtcgccaagtgctgttcaactcagggagccggggcttcgctccgtccctcccccggcttccagagctttttggggttggagggtgggaggccaggggcgttctcacagctgtgtgtcctctttcccatcctgcgcaga

SEQ ID NO: 1299 - RNA, 174 nt, synthetic construct
  source 1..174: mol_type = other RNA
tatatgatagttcgtttatttcacatctttgacagcatttagtgttgtcagggttttttttgtttgttttagacattttagtagtctggctcttgctgattgaattcctttggtgcagtttagcatgttcctctgtgttctgcatctcctgtagtgtaatgttcaagctcagaa

SEQ ID NO: 1300 - RNA, 174 nt, synthetic construct
  source 1..174: mol_type = other RNA
tcaaaggaagaggccccttaatatcctggaataatgggacccatccccgtaatcagtgaatctcatccacccgcttgccagcttctacccgcagcaagtagaagctaagtcctggctcaaatctcttccctccctccctctcccagctgtcagtgcttttggacttgtgctcag

SEQ ID NO: 1301 - RNA, 174 nt, synthetic construct
  source 1..174: mol_type = other RNA
tcaatcgccttttatctctggccctgggacctttgcctattttctgattgataggctttgttttgtctttacctccttctttctggggaaaacttcagttttatcgcacgttccccttttccatatcttcatcttccctctacccagattgtgaagatggaaagggtccaaccc

SEQ ID NO: 1302 - RNA, 174 nt, synthetic construct
  source 1..174: mol_type = other RNA
tcacacctgccaagcatcacacctgcgatgcctgcacgagctgggtggggtccgcgcagctgcagtaagggggcgacccggcgtctgttagtcggcggttcatctccttcgtgcctcgatgagctttaacgccattttcctccattctctttcttcacctcttgagtttccaag

SEQ ID NO: 1303 - RNA, 174 nt, synthetic construct
  source 1..174: mol_type = other RNA
tcaccacggcggcagccctttaaacccctcacccagccagcgccccatcctgtctgtccgaacccagacacaagtcttcactccttcctgcgagccctgaggaagccttctttccccagacatggccaacaagggtccttcctatggcatgagccgcgaagtgcagtccaaaat

SEQ ID NO: 1304 - RNA, 174 nt, synthetic construct
  source 1..174: mol_type = other RNA
tcaccgaggtagagagaaaagggcagtagccctagagactattgcgacacagtgtgcccctcataagtttttccagggaggggttctgtactgagttgacgccccaggagctgagcaccaggctttgcatccttgggaactcagcaaacgtttgttcagccaattgcaggtagc

SEQ ID NO: 1305 - RNA, 174 nt, synthetic construct
  source 1..174: mol_type = other RNA
tcactcactcacacacctcccccagctcacctcctccccactccagcatggccgcctccaccatgtccatctgctccagcgcctgcaccaactcctggcaggtggacgactgcccagagagctgctgtgagctcccctgcggcacccccagctgctgtgccccagccccctgcc

SEQ ID NO: 1306 - RNA, 174 nt, synthetic construct
  source 1..174: mol_type = other RNA
tcactgttcagcctcggggcccaggcgcttcctggaatctctccttggccggggttaaaatgcagttcccgctcaaaatgcttataggttgatagaagtccagatcctgaggaaatctccagctaaatgctcaaaatataaaatactgagctgagatttgcgaagagcagcagc

SEQ ID NO: 1307 - RNA, 174 nt, synthetic construct
  source 1..174: mol_type = other RNA
tcagatggtcactagaggctgctgcttaccagcggctctgctgggcccagacaaccacccagcaaaccaaactcaaccctggatgaatctgtggcccaaacacgcagtggatcccacagtcggtgctaacagttctctctctacctagtggacgagcgccttcccctggtgccg

SEQ ID NO: 1308 - RNA, 174 nt, synthetic construct
  source 1..174: mol_type = other RNA
tcagcatacgtttatgaagattacccccacagctgtgtggcaagtgatcaaaaaggaacaggaccagagaagagcaggaaaactggtcagaaagcaggcgccctaaccctggattgccccctgtgggtcactttctcagtcattttgagctcagcctaatcaaagactgaggtt

SEQ ID NO: 1309 - RNA, 174 nt, synthetic construct
  source 1..174: mol_type = other RNA
tcatagtgggactatattcattcctccaaagttacagctgctctaaatctttcatcatcaaccaaggtggatctcaagagtggcctcgaagaatgtgctgtggcattgaacttatttctaagcaacaaatttacagacgccttagaattgcttcgcccctgggctaaggagagt

SEQ ID NO: 1310 - RNA, 174 nt, synthetic construct
  source 1..174: mol_type = other RNA
tccagaggacgccacaccccacatttgaatatttttttttcttgtcacgcaaacttcctgggcaggaactccaagggctcaatggacgggaagcagggtccttaaatacgtcccctcttggctcttgccgttccaggagccccagttaccgggagaggctgtgtcaaaggcgcc

SEQ ID NO: 1311 - RNA, 174 nt, synthetic construct
  source 1..174: mol_type = other RNA
tccaggttcacacaactggaacccatctccaggaacaaacagctggaacccatctcccgttgaagggaaactgccagatttttgtaagattcttcctcctgggcacctctaagatactgatggctctgcagaggacccattcattgcttctgcttttgctgctgaccctgctgg

SEQ ID NO: 1312 - RNA, 174 nt, synthetic construct
  source 1..174: mol_type = other RNA
tcccaaccggcttccccgccccatttggtgggggctggcccttggccctccaactcctttaccctacatgcctgagaagccagggaccaagatggatcttctcctcgacatcagctaagcctggaggactcttcccctcagagaccatggagagggacagccacgggaatgcat

SEQ ID NO: 1313 - RNA, 174 nt, synthetic construct
  source 1..174: mol_type = other RNA
tcccacccccagcctggggcctctgggagccttggtcctgagcagccaacacaccagcccagacagctgcaagtcaccatggacgctgaaggcctggcgctgctgctgccgcccgtcaccctggcagccctggtggacagctggctccgagaggactgcccagggctcaactac

SEQ ID NO: 1314 - RNA, 174 nt, synthetic construct
  source 1..174: mol_type = other RNA
tcccagacccggggctctccaaggccccgcgcttccgagctccgcgcaaactctggcttctcttgtacgacagaggtggtttgctcttccgttgccccgtggcttcagctcatctttggcaggaaggcgaggcttccgcccggcacaggggatgtccagctcgccgctgtccaa

SEQ ID NO: 1315 - RNA, 174 nt, synthetic construct
  source 1..174: mol_type = other RNA
tcccggggctacgaggcggaagcgaaggcagacgcagtctccgtcgttgacgttagtcgcagtcttcgctgctaacgttttgttatgagttgctaaaatggtgaaatgctgctccgccattggatgtgcttctcgctgcttgccaaattcgaagttaaaaggactgacatttca

SEQ ID NO: 1316 - RNA, 174 nt, synthetic construct
  source 1..174: mol_type = other RNA
tccctggctcgcctcgcgcctgccggcggatccgtggtcatgccaacccagcagccggctgcgccgagtactcgtgcccccaaaccctcccggagtctctctggctcactttgtgccctgttttctgatgcagactcgggatccgggatgaaggcggagcttccccctgggcct

SEQ ID NO: 1317 - RNA, 174 nt, synthetic construct
  source 1..174: mol_type = other RNA
tccgacggggctggcccggtttcctggcgacgcggccctgcaggcggttgcgttccccgtcgttaccctctttctcttcccgacgcgtgagttaggccgtaatgccttggctgctctcagcccccaagctggttcccgctgtagcaaacgtccgcggcctctcagggtcttact

SEQ ID NO: 1318 - RNA, 174 nt, synthetic construct
  source 1..174: mol_type = other RNA
tccgcccgcctcggcctcccaaagtgctgggattacaggcgtgagccaccgtgcccggccgggaggtcactttaaggagggctgtccaactgcaaggagccgcaagcaggaagtgaaaccacagcacttcaaaaaaagagggagactgggacaagcgtatctaagaggctgaac

SEQ ID NO: 1319 - RNA, 174 nt, synthetic construct
  source 1..174: mol_type = other RNA
tccgcttcggtttctgttgcgggacccggggtgtctcctagcgcaaccggaactagccttctgggggccggcttcctttatctctggcggccttgtagtcgtctccgagactccccacccctccttccctcttgaccccctaggtttgattgccctttccccgaaacaactatc

SEQ ID NO: 1320 - RNA, 174 nt, synthetic construct
  source 1..174: mol_type = other RNA
tccggatgagaggctaagccataatagaaagaatggagaattattgattgaccgtctttattctgtgggctctgattctccaatgggaataccaagggatattatttttacagatggttttccatactggaacccaaaggtaaagacactcaaggacagacatttttggcagag

SEQ ID NO: 1321 - RNA, 174 nt, synthetic construct
  source 1..174: mol_type = other RNA
tccggccacggtgatgacgagtctccgtcaacctcgtctggcacagctgggacctcctctgtgccagagctacctgggttttactttgaccctgaaaagaaacgctacttccgcttgctccctggacataacaactgcaaccccctgacgaaagagagcatccggcagaaggag

SEQ ID NO: 1322 - RNA, 174 nt, synthetic construct
  source 1..174: mol_type = other RNA
tcgcagactcctaagtggtctggaacctaacctgcagtgtctctgagcttctggcaagtatgaggcaaggatttcacagaagaacttggagcaaaaattcccactgtcatagctataggctgtccagtcttgagggagctgcaggaacaggaaaaagagaccttcagagaagac

SEQ ID NO: 1323 - RNA, 174 nt, synthetic construct
  source 1..174: mol_type = other RNA
tctccttacgtcacttcctctccagcccctgcgtaatcgataaggaaacccggacgctgctgcccctttctttttttcaggcggccgggaagatggcggacattcagactgagcgtgcctaccaaaagcagccgaccatctttcaaaacaagaagagggtcctgctgggagaaa

SEQ ID NO: 1324 - RNA, 174 nt, synthetic construct
  source 1..174: mol_type = other RNA
tctcgtttcaggtcaccatcagaaaagctaagtttgctgtatagtgaggatcaggagatctgatcctgattgcagaaccttccctgattacagaatcttgggattgttgagaggattacatgtaaagtaccaggacagtgcatggcacattggttggaataaaaacagggttga

SEQ ID NO: 1325 - RNA, 174 nt, synthetic construct
  source 1..174: mol_type = other RNA
tctgaaactatcttgttgttgatgcaggctattttcttgaccccttcatgggactcccaacaggggtaccccatttactcagcctgccctgctcaacctcttgcaggagggagcacacgagtgaacgagtgcaggaaccagctggctgctttagtgctgtgaggagtaaactcc

SEQ ID NO: 1326 - RNA, 174 nt, synthetic construct
  source 1..174: mol_type = other RNA
tctgaaatgggagtttaagacctacaatcagacaagggcagggagctgtcttgacccccagtggaggctgacaatttttttcctgtgtacactggacccctttcatagaggtgggtgctatgcaagtggagctggtgactgatggctgaccattgatacaggctaggaatacca

SEQ ID NO: 1327 - RNA, 174 nt, synthetic construct
  source 1..174: mol_type = other RNA
tctgccggcgcctgtccggacccgggcccctctccgctttcggccggcctcgggcaccgggcttctggagctcccggagccctgcctgttccctgtccatccaggccagcagctgaaggagcctcacctgcctcccttctctgagtagcacggatttgaggagaagcagcgaag

SEQ ID NO: 1328 - RNA, 174 nt, synthetic construct
  source 1..174: mol_type = other RNA
tctgcgcttccccatggggctggcctgcggcgcctgggcgctctgagattgtcactgctgttccaagggcacacgcagagggatttggaattcctggagagttgcctttgtgagaagctggaaatatttctttcaattccatctcttagttttccataggaacatcaagaaatc

SEQ ID NO: 1329 - RNA, 174 nt, synthetic construct
  source 1..174: mol_type = other RNA
tctggatacttttaggaaaagaaccttgttattatgtactaaagtgaataatttgtgctcttagagtaggagttggaactataggacttgaaggcaagagcaggtatcttatcaaggatctactcactcagtttccctaaagctctctctccagatcggattcaaccgcacatc

SEQ ID NO: 1330 - RNA, 174 nt, synthetic construct
  source 1..174: mol_type = other RNA
tctgggaattccgggcgtttcggctccttggtcgcagaggcaggaggcgtgcgtggcaggagggttcgggttatatactcctaggtcctgggacagaatagttacgacctctgggacaggaactcttctctcttttgttaataaacttccaactccctcctcagacccgaccgc

SEQ ID NO: 1331 - RNA, 174 nt, synthetic construct
  source 1..174: mol_type = other RNA
tcttgaaagcgccacaagcagcagctgctgagccatggctgaaggggaaatcaccaccttcacagccctgaccgagaagtttaatctgcctccagggaattacaagaagcccaaactcctctactgtagcaacgggggccacttcctgaggatccttccggatggcacagtgga

SEQ ID NO: 1332 - RNA, 174 nt, synthetic construct
  source 1..174: mol_type = other RNA
tctttcataggaagaaatcactgagaaaatgagcatcatttctcaaggtttttattttcactgatctacaagtgatgctgctgtaattgtagctgcagtttttaccgatcattcaccactcagcagctggtagagaagtaagcctgcttggcaaccacctgcagggctgcagag

SEQ ID NO: 1333 - RNA, 174 nt, synthetic construct
  source 1..174: mol_type = other RNA
tctttttatggactcttttctgttggcaaaaaaaacctgttatttcttgatcttttggcaccattttcgcacttaataatggcgtaatttctcttctatttgttttctatttgcccatctgttcttttttctccttttcctgccttcttttggaccaaaaacgaaaaccaagaa

SEQ ID NO: 1334 - RNA, 174 nt, synthetic construct
  source 1..174: mol_type = other RNA
tgaactgtggttcccctgcctcccagcccggctgtgagtgctcagcgaccctgacaggctgacaggaccaggagggaggtgccgctcagattctggcaggaccgctggcgggcaggcaggggacagttgggccatatggtgctcttcccagtctggttcctgtacagtctgctc

SEQ ID NO: 1335 - RNA, 174 nt, synthetic construct
  source 1..174: mol_type = other RNA
tgacaggcatgagccaccgcgcctggccccttcttttgaatgggcctccttgcgtttccgtttcaatgccccgtgctacttttttgggagccccaaggctgtactgtttgattgactcctttttttcccctttctttttaacctaaattaaagctgccactgcagagccccgcc

SEQ ID NO: 1336 - RNA, 174 nt, synthetic construct
  source 1..174: mol_type = other RNA
tgactagaatcaggtgcttttgtttctgaagtgcttttattcttactttgacccccaggctggagtgcagtggcacgatcttggttcaccacaatctcgtctcgaaggctcaggtgattctctcacctcagccgcctgagtagctgggaccacagtttcagctgtgagttcaac

SEQ ID NO: 1337 - RNA, 174 nt, synthetic construct
  source 1..174: mol_type = other RNA
tgagattgcccggtacagcagcagttgtattctttattagcttggtagatcattttctctcgctcttttttttaatactagcaactttcatcctttgaaacgtgtgctgaaaaagaagaatcagcaaatactactgaaagtgcaatatttgagtatcactgcgagctgtttgag

SEQ ID NO: 1338 - RNA, 174 nt, synthetic construct
  source 1..174: mol_type = other RNA
tgagcgcctggagttggagacaattcctggttcagaatttaaacatctttctaggtctgcgcggggcggccattggcggcggagtgtcacgtgaccgcgggggcgtgccaatgtgcgccctcacgggtgtcaaacccctgtcagagtgtgcgatcaagatcgtgaaacaacgcg

SEQ ID NO: 1339 - RNA, 174 nt, synthetic construct
  source 1..174: mol_type = other RNA
tgataacatttcctctcaaaccttatcccttactctgcatttgggagatcatacacagagaagccttataaatgtaagagatgtggaaatatcttcagccaaaagtaaatcctcactcatcaagaaatttttactggagagaaaccttgtgaatgtgggaaagcttccattcag

SEQ ID NO: 1340 - RNA, 174 nt, synthetic construct
  source 1..174: mol_type = other RNA
tgataaccacagaatcagaacatataaaaagctctgcgggactggtgctgactgcaaccatgacaaagcttattctcctcacaggtcttgtccttatactgaatttgcagctcggaacagccagctgaaaactctcctggccattggaggctggaacttcgggactgccccgaa

SEQ ID NO: 1341 - RNA, 174 nt, synthetic construct
  source 1..174: mol_type = other RNA
tgattggtataacatctcactttccctctgcattgattttcttcttctcctcctttgcttcataaaaagagggacaagtggctggtgctgtggacagagaagctttatttttagtatgagacaacctctattttctttcaggagagggaagttggattatcaattcttttgtaa

SEQ ID NO: 1342 - RNA, 174 nt, synthetic construct
  source 1..174: mol_type = other RNA
tgcatcccttctgtccctccacccgtccccttccccaccctctggcccccaccttcttggaggcgacaacccccgggaggcattagaagggatttttcccgcaggttgcgaagggaagcaaacttggtggcaacttgcctcccggtgcgggcgtctctcccccaccgtctcaac

SEQ ID NO: 1343 - RNA, 174 nt, synthetic construct
  source 1..174: mol_type = other RNA
tgcgtgggtactggaacaagcaaacgaggcagcgagcgaaggacgggagccggaccctgggccccgtggaactccagcctgcgccaccacgtcacgcacacgctcggcgctgcgatccgcgcatataacgatatttggatttgacctgcattttggaatttatctacacttaaa

SEQ ID NO: 1344 - RNA, 174 nt, synthetic construct
  source 1..174: mol_type = other RNA
tgctaaatctcactgtcactgctaaattcagagcagatagagcctgcgcaatggaataaagtcctcaaaattgaaatgtgacattgctctcaacatctcccatctctctggatttctttttgcttcattattcctgctaaccaattcattttcagactttgtacttcagaagca

SEQ ID NO: 1345 - RNA, 174 nt, synthetic construct
  source 1..174: mol_type = other RNA
tgctacacaccactctggcttacgcttccagctaacagcggtttgtctgtgtttctggactgaagtgactgatgaaaaacagtagtcaagtctggagggtgattccctttcagttcacttgcctttcagttctggggaaattagaagatttgctctctctctctgcttcttaga

SEQ ID NO: 1346 - RNA, 174 nt, synthetic construct
  source 1..174: mol_type = other RNA
tgctcaaaacttcctgtcagtgacgcacttcccctctgctgggcgcgcggtggacggtctgaaagggagtgttcgggtttcgctggggcctcgcggctccagagcccagcatggcttcctcgcgagcctcttccacggcaaccaaaactaaagcacccgacgacttagttgctc

SEQ ID NO: 1347 - RNA, 174 nt, synthetic construct
  source 1..174: mol_type = other RNA
tgctcctctacctgctctactctcaatccgccagaatcatgggctgctgtggctgttctggaggctgtggctctggctgtgggggctgtggctccggcagtgggggctgtggctctggctgtgggggctgtggctccagctgctgtgtgcccatttgctgctgcaagcctgtgt

SEQ ID NO: 1348 - RNA, 174 nt, synthetic construct
  source 1..174: mol_type = other RNA
tgctctggaccccagccccacttgctctagatgctcacccaccgtccccaggaagcagaacagaggggtcggacccctggtccttcctttgagtggaacgtgctggccaaagcgctctatgacaatgtggccgagtccccggatgagctctccttccgcaagggtgacatcatg

SEQ ID NO: 1349 - RNA, 174 nt, synthetic construct
  source 1..174: mol_type = other RNA
tgctgccctgactttttaagaaatctcaatgaactatttgtagagaatcactgatccggcctgcaagcattttgcacggcaaaaatatcgatcagtgttaagtgaagatcacattttatatgcgatcttgacttttttgtcttacattatatttttatagattttgttataaac

SEQ ID NO: 1350 - RNA, 174 nt, synthetic construct
  source 1..174: mol_type = other RNA
tgctggagtcgtgtgttttggctgcgcgtgatcctgcgtgggtcgggaggtgtttctgtgtaggtgtctggccctttcatcagtcgtgcggaggaccgcgtgatttccttccagttctcctcggttttcaggaaaagcctaaagattagactgtaagaaaagaaaatagaagcc

SEQ ID NO: 1351 - RNA, 174 nt, synthetic construct
  source 1..174: mol_type = other RNA
tgctttatagcgtgcaaacctcgccgcgccagggccaagggacaggttggagctgttgatctgttgcgcaattgctattttccccagagcggctttgtctttggatttagcgtttcagaattgcaattccaaaatgtgtaagacgggatattctcttctgtgctgtcaagggac

SEQ ID NO: 1352 - RNA, 174 nt, synthetic construct
  source 1..174: mol_type = other RNA
tggaagatgggaaatggccaaaagaataaaccatttcctcttacttaccgaatgaaaagcttgcttcatcttggcgttcaagactctctaatatgattccacctgttgggctctttcttccatttgcctccgcagatagtgtctgccttctggagagctgaccaaacactaagg

SEQ ID NO: 1353 - RNA, 117 nt, synthetic construct
  source 1..117: mol_type = other RNA
cacttggcttcaaagctggctcttggaaattgagcggagagcgacgcggttgttgtagctgccgctgcggccgccgcggaataataagccgggatctaccatacccattgactaact

SEQ ID NO: 1354 - RNA, 174 nt, synthetic construct
  source 1..174: mol_type = other RNA
tggctgaggaaggaggaggcacccacaggctgctgggaggagagcataaggaatctacttgaaaatggatcggtttatgttggattaaatgctgctctttgtggcctcatagcaaacagtctttttcgacgcatcttgaatgtgacaaaggctcgcatagctgctggcttacca

SEQ ID NO: 1355 - RNA, 174 nt, synthetic construct
  source 1..174: mol_type = other RNA
tgggagcgatctggaaagctgcacttgtgctcccttcctcgtaggtttgctgtggaacgttgtggcttctgtggctcctcaggcccgggggcgccccttgaaccctccactcttggctccaagcaccttccctgggaagctgtatctgctgggttcgcagacaggaacagaaac

SEQ ID NO: 1356 - RNA, 174 nt, synthetic construct
  source 1..174: mol_type = other RNA
tggggtgcccagaacactggccctgggctagcgacttgcctcagccccatttcccggagaggctgccatgaagaggaagccggcggagtcttggtgctgagtctgagggcttcaggcaggacccaagactctcctctgaggtagcagcccccagagaaggttagctgttctctg

SEQ ID NO: 1357 - RNA, 174 nt, synthetic construct
  source 1..174: mol_type = other RNA
tggggtttgtgaagtcgtggcccgttagcaggaagcctaacagtcgccccgacgctagtgagggacccaatctgagtccccggccagccgaatccaagccgtgtgtactgcgtgctcagcactgcccgacagtcctagctaaacttcgccaactccgctgcctttgccgccacc

SEQ ID NO: 1358 - RNA, 174 nt, synthetic construct
  source 1..174: mol_type = other RNA
tggtggcagcaggtgcttagcagcccttgtccagtctcgcctgtgacactgctgctcccttcccctgtcctgacctcctggttggctgtcctgccagagccttgcctggaagatgaaattccagctaccctgtgggagcagtaacgccttcttccttcttctcaatctccagaa

SEQ ID NO: 1359 - RNA, 174 nt, synthetic construct
  source 1..174: mol_type = other RNA
tgtccagtgccaaaaccaagatcaaaaagcaacctcagaccaatacccagagattctcacattaaagagcaaagtcaacagaaaatcagcccagcagccgtaggagaggagtcatccccaggccggccccagtctctgctggacaacgctagcacctcagacagtcaggcagtg

SEQ ID NO: 1360 - RNA, 174 nt, synthetic construct
  source 1..174: mol_type = other RNA
tgtcgtaagattttttcttttcattttctccagggagggtaaatcaatataacctcttctctagagaggaggtggttaggttggtcttaagcagtgttagaagatctattttttttcaaaccaggtgtctgagctgggtgaattccagcctggggagaggactttgatcaccag

SEQ ID NO: 1361 - RNA, 174 nt, synthetic construct
  source 1..174: mol_type = other RNA
tgtgacttcacctcagttttgtgatccgtaaaatggacaaattcgaagctacttcacagtgctgttgagaggattaaatgaaacaatgcttgtaaagctctttgcaggagggagcctcggaagcagggcctggccggcagagcacacctgctgtcaccagggaccacaggcagc

SEQ ID NO: 1362 - RNA, 174 nt, synthetic construct
  source 1..174: mol_type = other RNA
tgtgagaggagcaggttcaggtaaacaaagggcgaggacccgagcgagcttaaggagtggggtgcagcgtctggtcagcggagggtgaattctcaggactggtcgggagtcaaggtgccacatctcctgcctttctgctcactttcctgcctgttttgcctgaccacagccatc

SEQ ID NO: 1363 - RNA, 174 nt, synthetic construct
  source 1..174: mol_type = other RNA
tgtgctgagctggcgcagcggcagcagcatgagccggaccctcgcatcggccgtgcccctgtcgagtcccgactactacgagaggctgggccaactccagcacgggctgcgggacagtgaaaagaagagattggacctggaaaagaaactttatgaatataatcagtctgatac

SEQ ID NO: 1364 - RNA, 174 nt, synthetic construct
  source 1..174: mol_type = other RNA
tgtgctttctctctgtttcagctgttttccttttaagatactcctctcagatttgtgtgcttcttcccttcccacattctatactgcccagcgcctgggattccagatctgcgtttgaatccaggaaagggaggtggacacctgcgcaggtgtgtgccctccggcccctgaagc

SEQ ID NO: 1365 - RNA, 174 nt, synthetic construct
  source 1..174: mol_type = other RNA
tgtgtgtatttcctcccgttctttatcagagcccccaaaataagtaggaatgggcagtggctattcacattcactacaccttttccatttgctaataaggccctgccaggctgggagggaattgtccctgcctgcttctggagaaagaagatattgacaccatctacgggcacc

SEQ ID NO: 1366 - RNA, 174 nt, synthetic construct
  source 1..174: mol_type = other RNA
tgttcgccgttactctgcgcgtaagtcgcttgtccgtggcttctctgagaagaaaagttgaaaaagggtaaaagttttcaggaatattcgggctctctattgctaagcatagcgagtgtcggttttctctctccaacagacatcgctattgcggttccgaggcagtgggaagag

SEQ ID NO: 1367 - RNA, 174 nt, synthetic construct
  source 1..174: mol_type = other RNA
ttcagaatgcagtgtactgttgtggagtcttcccgctatctagttccaaaatttcatcaccccaaatggaaatcctttacccattgacagttactccccattctccccttcctctagcccctggcaaccactaatctgctttctatctatggatttgcctattctggacatttc

SEQ ID NO: 1368 - RNA, 174 nt, synthetic construct
  source 1..174: mol_type = other RNA
ttcatctattgtaggcctagcccctgcctttgaaaacaaggaaaggttggtagaacatcaacacagcatggaatttccagggaggtctcatttcaaaacttcataaagaacaagaaccacctggacttctgtgagggcgatgattaaactggcctgagtttgaatgaaaggata

SEQ ID NO: 1369 - RNA, 174 nt, synthetic construct
  source 1..174: mol_type = other RNA
ttcatggtgactgggacgagtaggtttcactgtttctcataggagacttgacagcttaaagtaaaaacaaattattttcgtcaaagtttttttttttctcttaactgatttttagcaaacctcagactgagacacaggactcaacggtgtattcctggaaggcaaggtgctata

SEQ ID NO: 1370 - RNA, 174 nt, synthetic construct
  source 1..174: mol_type = other RNA
ttccccaagtcacacagtggtatcagagctaagaatgggacccagatatgactgatctagttctgttccaaaaccgtgctgtattatattaacgcctaccctctgaagaggtccaagcaacggaagtactactacgaagctgcctttctggccatccttgagaaaaatagacag

SEQ ID NO: 1371 - RNA, 174 nt, synthetic construct
  source 1..174: mol_type = other RNA
ttcccccgccgccaggctgacttctcatcgcttgtttttctttttgcatttttcctcccaccgccgttgccgccctccccgtcctggccgtccgccctccgccctctgcagggacatctctacaccgttcccatccgggaacagggcaacatctacaagcccaacaacaaggcc

SEQ ID NO: 1372 - RNA, 174 nt, synthetic construct
  source 1..174: mol_type = other RNA
ttccggcgttgttgaccctatttcccgtgctgcaccgcagcccctttctcttccggttctaggcgcttcgggagccgcggcttatggtgcagacatggccaagtccaagaaccacaccacacacaaccagtcccgaaaatggcacagaaatggtatcaagaaaccccgatcaca

SEQ ID NO: 1373 - RNA, 174 nt, synthetic construct
  source 1..174: mol_type = other RNA
ttcctgctcttgaatatctggttgaactacttaagcttaatttgttaaactccggtaagtacctagcccacatgatttgactcagagattctcttttgtccacagacagtcatctcaggagcagaaagaaaagagctcccaaatgctatatctattcaggggctctcaagaaca

SEQ ID NO: 1374 - RNA, 174 nt, synthetic construct
  source 1..174: mol_type = other RNA
ttcctggtccagaactttacacagaaaaggtgctcaaaggatatttgtttaatgaatgtggtatgctgacatttaaacaggacaaaacttgtagaacttcatggaggaacacggagtgacccaaaccgaacatatggctaccatagaagcacatgcagtggcccagcaagtgca

SEQ ID NO: 1375 - RNA, 174 nt, synthetic construct
  source 1..174: mol_type = other RNA
ttctgcgtttctctagtgcagtgcctggagatgaccaccaaacggaaaatcatcggccgtctggtgccatgccgatgtttccgaggtgaagaagaaatcatctcagttttagattactcccactgcagtcttcagcaggtgccaaaggaggtctttaacttcgaacgaacatta

SEQ ID NO: 1376 - RNA, 174 nt, synthetic construct
  source 1..174: mol_type = other RNA
ttctgtaccgcgtctgatgatggagagtcccggggacacctccgcggacacgtgttggactcagggctttaggcccgtgacagctgacagcttcagacacaggaggaagggagggaagggggaggacagaggagacaggcaggtgctgtcctcaaagccctgcgttcttctgag

SEQ ID NO: 1377 - RNA, 174 nt, synthetic construct
  source 1..174: mol_type = other RNA
ttctgtgacctgctcctgggactttgctggctcacggagacacttctctatggagcttcagtagcaaataaggacatcatctgctataacctacaagcagttggacagatattctacatttcctcatttctctacaccgtcaattacatctggtatttgtacacagagctgagg

SEQ ID NO: 1378 - RNA, 174 nt, synthetic construct
  source 1..174: mol_type = other RNA
ttctgttcttggagtctagacagcatcaggagttgggctcagtgaacaaaactttaatgtctagagcatttatgagggttttaatgattggaaaatctatcctgagaatgtggtcaccatatgtgacagccttgctttctatcttgtcttcagtttctggggcttctctgcaga

SEQ ID NO: 1379 - RNA, 174 nt, synthetic construct
  source 1..174: mol_type = other RNA
ttgaagcaaggttgtggagaaaagcaaaggagacaaaaagtaaccttcctgaagaggacatgtgattggaagttgtcaattgttgaagcattggtaactccagtctctaacgttttagaaaatcataacaagcggttctctaccctgtaaaggtgaactactgagttcttcatt

SEQ ID NO: 1380 - RNA, 174 nt, synthetic construct
  source 1..174: mol_type = other RNA
ttgagttttccccaggctgctctattgttgcctgtagctgtgatttttcaggcaggctgctcctctgaggaccacccttaactgtctacctaactggtttttccttttcttctcctcatttgtatttatgtatcagtgtattatgtatttatatacacttggagatacagtaaa

SEQ ID NO: 1381 - RNA, 174 nt, synthetic construct
  source 1..174: mol_type = other RNA
ttgcacaaaaacctggaatcttttaggagtctcctcccagtcgttgaaggtttggggagcagctgatacagcaaggagggctcttgcaaggattcaagctccgagccctggaggagcagcacggagcgggagagcgtggcgagagaatgaagaaaccaatcgcccgggagaagc

SEQ ID NO: 1382 - RNA, 174 nt, synthetic construct
  source 1..174: mol_type = other RNA
ttgcctgattccgcacgagagtgtcaatgaagacctcaaagtctggagaaaaatgacctttcatggaataagaagtatacctccttctacatgtttttgtcttactgacctctgataactggaacacatgactctgggtctgtagaaagtcaactgatcaaactcatcctcacc

SEQ ID NO: 1383 - RNA, 174 nt, synthetic construct
  source 1..174: mol_type = other RNA
ttgcttcaggccatctggatgtatacatgcaggtcacagggaatatgatggcttagcttgggttcagaggcctgacacctcaggctgccaaatgtggaagatttaaatacttgaaccaataccctcctcccaaaaactgaaattggcttctgtttctgagttggtccaggcgca

SEQ ID NO: 1384 - RNA, 174 nt, synthetic construct
  source 1..174: mol_type = other RNA
ttggagagaggggtgatgcctggtgctggtggaacccctgcacagagacggacacaggatgagctctaagtacccgcggtctgtccggcgctgcctgcccctctgggccctaacactggaagcagctctcattctcctcttctatttttttacccactatgacgcttccttaga

SEQ ID NO: 1385 - RNA, 174 nt, synthetic construct
  source 1..174: mol_type = other RNA
ttggggaggtgagaggtgatttcctgccattcttctgtggggcgggcttcccagggtgctcatgccaggctgacgggtccagtgcgggctcccgctgctgggggagagctgggttttcatggggcggcagccgaggcaggacccgcagccatgaaccgcttcaatgggctctgc

SEQ ID NO: 1386 - RNA, 174 nt, synthetic construct
  source 1..174: mol_type = other RNA
ttggggcctgggttcctttgccccttgcccaccagggaggggtgggagacgagagagggtgaactttcccctgcgagattctggtgaaaggggaaatatgcttcgagtcagtaaagctgcgcaagtgcacagtcaaggagagagtcttgggaaaaccaaggatagttcccggag

SEQ ID NO: 1387 - RNA, 174 nt, synthetic construct
  source 1..174: mol_type = other RNA
ttgtcccaagtcgattgatttcccagctatattgtggcctgaagcctccagcgtccacacgaaaccagatttgcctgaaaatggctcggccaagttcaagacctggcgactcccctggcctttgcccacaacccgtcccgggtgtgggagttctaccactaccggcgggaggtc

SEQ ID NO: 1388 - RNA, 174 nt, synthetic construct
  source 1..174: mol_type = other RNA
ttgtttgttgtgttttccctggcaaacagctggagaaagagcagctcatggagaggctgagagaagcggttttcgcgtcctacccaaactgggagagtaaccttcagcagctggactcaccgattggttttccttcattttcagtgaaatcccattctctggctggagacacag

SEQ ID NO: 1389 - RNA, 174 nt, synthetic construct
  source 1..174: mol_type = other RNA
tttagtgtcacaggagacacgagggcaaagtgctgaggaaactctagagcaacatcggaatgcatggtgaagcatcagatggtgaaggagaaggagacacagaagtgatgcagcaggagacagttccagttcctgtaccttcagagaaaaccaaacagcctaaagaatgttttt

SEQ ID NO: 1390 - RNA, 174 nt, synthetic construct
  source 1..174: mol_type = other RNA
tttccgggtgtgtgtttccggcgtcggcggccgcggccggggacggtgtgagagcggtaagatggcggcggcggcggtggtggagttccagagagcccagtctctactcagcaccgaccgggaggcctccatcgacatcctccactccatcgtgaagcgtgacattcaggaaaa

SEQ ID NO: 1391 - RNA, 174 nt, synthetic construct
  source 1..174: mol_type = other RNA
tttcctttcggccggaaccgccatcttccagtaattcgccaaaatgacgaacacaaagggaaagaggagaggcacccgatatatgttctctaggccttttagaaaacatggagttgttcctttggccacatatatgcgaatctataagaaaggtgatattgtagacatcaaggg

SEQ ID NO: 1392 - RNA, 174 nt, synthetic construct
  source 1..174: mol_type = other RNA
tttctagtaccttctcaggatccctcctccgccaacgaattcctcaaccacgggccaagcaaactactcccccgcccactgtcagcagcagtctctgttgaatgggaatactgcaccttcaggcttaacgccacgtgggctcctttgctgtcctccaggcactgttatagaaga

SEQ ID NO: 1393 - RNA, 174 nt, synthetic construct
  source 1..174: mol_type = other RNA
tttgaaagcgtgggctgaatgctgacctcccggacatcatgagtgttgttctacctgcgccccctggacatcctggcggaagtggtcccttctgatggcgccacaagcgggatcaggatagttcaggttcacggtgcacggggactccagctctcagtagccgccccccgcacc

SEQ ID NO: 1394 - RNA, 174 nt, synthetic construct
  source 1..174: mol_type = other RNA
tttgcgggaaagcagcggacttgaaaatactggaaatctgtccggatccaaattattttgcaagccagatgagtaaccagagggcatgaaaggttgagaacatttgacttccctgcaaaccttggtatagatcacttccttttctgtaggaaaggaaaggcaccaaagagcaca

SEQ ID NO: 1395 - RNA, 174 nt, synthetic construct
  source 1..174: mol_type = other RNA
tttgggcattgtccccgggtcttccaacggactgggcgttgctcccggacactgaggactggccccggggtctcgctcaccttcagcagcgtccaccgcctgccacagagcgttcgatcgctcgctgcctgagctcctggtgcgcccgcggacgcagcctccagcttcgcggag

SEQ ID NO: 1396 - RNA, 174 nt, synthetic construct
  source 1..174: mol_type = other RNA
tttggtctgcttctcgaaggttcaattcacagagcacttcatatctaccagggtaatatcaaaatatatgttcctaaaacatccctgagttcaccaccttggccagaagttgttctgccagacccagttgaggagaccagacaccatgcagaggtcgtgaagaaggtgaatgag

SEQ ID NO: 1397 - RNA, 174 nt, synthetic construct
  source 1..174: mol_type = other RNA
ttttcagcctgtgatttgataaccgccgccgggtggcgtggagcgtcccgagacttcttccttcattgcagcccctcttcttttagttctagactgaagttcgaggaacgcaccacttggctgaaattaggatccagatttcccaaacttccttcggaggaaaaagccctaacg

SEQ ID NO: 1398 - RNA, 174 nt, synthetic construct
  source 1..174: mol_type = other RNA
ttttgattgccatttccttgggacagcctgaagagagaatcgaaagaagttcttttcagtatggttgcataacatcgagtcggagattgtgaaatgtcctttgagaaaaatgtacgggcaggaagatgaataggtgtctgtttgattaaggctctccttcggaaagatgtcgga

SEQ ID NO: 1399 - RNA, 174 nt, synthetic construct
  source 1..174: mol_type = other RNA
ttttgccggatgttgttgtatgtccgagagacacgtgaggttctgctacgtcattaccaggcacgcgcaggaaacatggcggcggcgggtgttgtgagcgggaaggtttttggtttcttcttgattcaatcttgataagtagtatgtgtccaggactttatccatactccagtt

SEQ ID NO: 1400 - RNA, 174 nt, synthetic construct; identical to SEQ ID NO: 1000
  source 1..174: mol_type = other RNA

SEQ ID NO: 1401 - RNA, 233 nt, synthetic construct
  source 1..233: mol_type = other RNA
cagagatccaggggaggcgcctgtgaggcccggacctgccccggggcgaagggtatgtggcgagacagagccctgcacccctaattcccggtggaaaactcctgttgccgtttccctccaccggcctggagtctcccagtcttgtcccggcagtgccgccctccccactaagacctaggcgcaaaggcttggctcatggttgacagctcagagagagaaagatctgagggaag

SEQ ID NO: 1402 - RNA, 30 nt, synthetic construct
  source 1..30: mol_type = other RNA
gttgtcagtccgatctcgcgagagaggacg

SEQ ID NO: 1403 - RNA, 117 nt, synthetic construct
  source 1..117: mol_type = other RNA
atggaggagccgcagtcagatcctagcgtcgagccccctctgagtcaggaaacattttcagacctatggaaactacttcctgaaaacaacgttctgtcccccttgccgtcccaagca

SEQ ID NO: 1404 - RNA, 180 nt, synthetic construct
  source 1..180: mol_type = other RNA
cagaaagtgccacgactccacacgcgcgcacgcagccagcgagcggccggagcggacggcagacggggcgggcggcgtcagggtcgcagcgtctacagctgctcgggggcggtttcttggcggaggcttggccggctcctctctcccggctccgcggcggctgcgaaggcggcggctcct

SEQ ID NO: 1405 - RNA, 237 nt, synthetic construct
  source 1..237: mol_type = other RNA
agtctatgaggagggacctacaaagactggaaactattcttagctccgtcactgactccaagttcatcccctctgtctttcagtttggttgagatataggctactcttcccaactcagtcttgaagagtatcaccaactgcctcatgtgtggtgaccttcactgtcgtatgccagtgactcatctggagtaatctcaacaacgagttaccaatacttgctcttgattgataaacaga

SEQ ID NO: 1406 - RNA, 94 nt, synthetic construct
  source 1..94: mol_type = other RNA
acttgtttcctttcatttcctttttttcttttcttttcttttttttttttttttttttttttgagaaaggggaatttcatcccaaataaaagga

SEQ ID NO: 1407 - RNA, 100 nt, synthetic construct
  source 1..100: mol_type = other RNA
ggcccccgccttccgcgccccccacgggaaggaagcacccccggtattaaaacgaacggggcggaaagaagccctcagtcgccggccgggaggcgagccg

SEQ ID NO: 1408 - RNA, 180 nt, synthetic construct
  source 1..180: mol_type = other RNA
ggcgcctccctctgttcctcccaaggctaaactttctaattcccttctttgggctcgggggctcccggagcagggcgagagctcgcgtcgccggaaaggaagacgggaagaaagggcaggcggctcggcgggcgtcttctccactcctctgccgcgtccccgtggctgcagggagccggc

SEQ ID NO: 1409 - RNA, 71 nt, synthetic construct
  source 1..71: mol_type = other RNA
ccacctgttgcaacttcttttttacagatggagtcatcagaacccactgtgaggaagtgacttctccttga

SEQ ID NO: 1410 - RNA, 228 nt, synthetic construct
  source 1..228: mol_type = other RNA
tgcggcgccattttaagcctctcggtctgtggcagcagcgttggcccggccccgggagcggagagcgaggggaggcggagacggaggaaggtctgaggagcagcttcagtccccgccgagccgccaccgcaggtcgaggacggtcggactcccgcggcgggaggagcctgttcccctgagggtatttgaagtataccatacaactgttttgaaaatccagcgtggaca

SEQ ID NO: 1411 - RNA, 150 nt, synthetic construct
  source 1..150: mol_type = other RNA
tgatttctttttgtggtaaaaatcttagttcatgtgaagaaatttcatgtgaatgttttagctatcaaacagtactgtcacctactcatgcacaaaactgcctcccaaagacttttcccaggtccctcgtatcaaaacattaagagtata

SEQ ID NO: 1412 - RNA, 166 nt, synthetic construct
  source 1..166: mol_type = other RNA
cacacggactacaggggagttttgttgaagttgcaaagtcctggagcctccagagggctgtcggcgcagtagcagcgagcagcagagtccgcacgctccggcgaggggcagaagagcgcgagggagcgcggggcagcagaagcgagagccgagcgcggacccagcc

SEQ ID NO: 1413 - RNA, 472 nt, synthetic construct
  source 1..472: mol_type = other RNA
cttcttcgtcagcctcccttccaccgccatattgggccactaaaaaaagggggctcgtcttttcggggtgtttttctccccctcccctgtccccgcttgctcacggctctgcgactccgacgccggcaaggtttggagagcggctgggttcgcgggacccgcgggcttgcacccgcccagactcggacgggctttgccaccctctccgcttgcctggtcccctctcctctccgccctcccgctcgccagtccatttgatcagcggagactcggcggccgggccggggcttccccgcagcccctgcgcgctcctagagctcgggccgtggctcgtcggggtctgtgtcttttggctccgagggcagtcgctgggcttccgagaggggttcgggctgcgtaggggcgctttgttttgttcggttttgtttttttgagagtgcgagagaggcggtcgtgcagacccgggagaaag

SEQ ID NO: 1414 - RNA, 1578 nt, synthetic construct
  source 1..1578: mol_type = other RNA
catagagccagcgggcgcgggcgggacgggcgccccgcggccggacccagccagggcaccacgctgcccggccctgcgccgccaggcacttctttccggggctcctagggacgccagaaggaagtcaacctctgctgcttctccttggcctgcgttggaccttcctttttttgttgtttttttttgtttttcccctttcttccttttgaattaactggcttcttggctggatgttttcaacttctttcctggctgcgaacttttccccaattgttttccttttacaacagggggagaaagtgctctgtggtccgaggcgagccgtgaagttgcgtgtgcgtggcagtgtgcgtggcaggatgtgcgtgcgtgtgtaacccgagccgcccgatctgtttcgatctgcgccgcggagccctccctcaaggcccgctccacctgctgcggttacgcggcgctcgtgggtgttcgtgcctcggagcagctaaccggcgggtgctgggcgacggtggaggagtatcgtctcgctgctgcccgagtcagggctgagtcacccagctgatgtagacagtggctgccttccgaagagtgcgtgtttgcatgtgtgtgactctgcggctgctcaactcccaacaaaccagaggaccagccacaaacttaaccaacatccccaaacccgagttcacagatgtgggagagctgtagaaccctgagtgtcatcgactgggccttcttatgattgttgttttaagattagctgaagatctctgaaacgctgaattttctgcactgagcgttttgacagaattcattgagagaacagagaacatgacaagtacttctagctcagcactgctccaactactgaagctgattttcaaggctacttaaaaaaatctgcagcgtacattaatggatttctgttgtgtttaaattctccacagattgtattgtaaatattttatgaagtagagcatatgtatatatttatatatacgtgcacatacattagtagcactacctttggaagtctcagctcttgcttttcgggactgaagccagttttgcatgataaaagtggccttgttacgggagataattgtgttctgttgggactttagacaaaactcacctgcaaaaaactgacaggcattaactactggaacttccaaataatgtgtttgctgatcgttttactcttcgcataaatattttaggaagtgtatgagaattttgccttcaggaacttttctaacagccaaagacagaacttaacctctgcaagcaagattcgtggaagatagtctccactttttaatgcactaagcaatcggttgctaggagcccatcctgggtcagaggccgatccgcagaaccagaacgttttcccctcctggactgttagtaacttagtctccctcctcccctaaccacccccgcccccccccaccccccgcagtaataaaggcccctgaacgtgtatgttggtctcccgggagctgcttgctgaagatccgcgcccctgtcgccgtctggtaggagctgtttgcagggtcctaactcaatcggcttgttgtg

SEQ ID NO: 1415 - RNA, 348 nt, synthetic construct
  source 1..348: mol_type = other RNA
ttaagtacaaggtaaatatattttattcttaatattttaaggaatttgatttagacatttttcctttctagggacagtttggataattttccgtgaaactggatgatctttgaatattaaatgaaaggagactagaataacagtctcttgactattcatgaaggagctttagcagaagcattctttcttggtgtgcaaatcacgcctggcagcccctgcccacagtacccgaagatggcaggccttgttcccttcacctaaattcataaacctgggtgtagtggcttctgatgctgatttgtttctcttttcagtaagtgtggacctttgtgtaccagagagaacatc

SEQ ID NO: 1416 - RNA, 40 nt, synthetic construct
  source 1..40: mol_type = other RNA
attccagcgcctgacagccaggaccccaggcagcagcgag

SEQ ID NO: 1417 - RNA, 132 nt, synthetic construct
  source 1..132: mol_type = other RNA
atgaagaagaaaacccggcgccgctcgacccggagcgaggagttgacccggagcgaggagttgaccctgagtgaggaagcgacctggagtgaagaggcgacccagagtgaggaggcgacccagggcgaagag

SEQ ID NO: 1418 - RNA, 94 nt, synthetic construct
  source 1..94: mol_type = other RNA
cgggcccctgccgcctgcaagtcggaaattgcgctgtgctcctgtgctacggcctgtggctggactgcctgctgctgcccaactggctggcaag

SEQ ID NO: 1419 - RNA, 367 nt, synthetic construct
  source 1..367: mol_type = other RNA
aattccagcgagaggcagagggagcgagcgggcggccggctagggtggaagagccgggcgagcagagctgcgctgcgggcgtcctgggaagggagatccggagcgaatagggggcttcgcctctggcccagccctcccgctgatcccccagccagcggtccgcaacccttgccgcatccacgaaactttgcccatagcagcgggcgggcactttgcactggaacttacaacacccgagcaaggacgcgactctcccgacgcggggaggctattctgcccatttggggacacttccccgccgctgccaggacccgcttctctgaaaggctctccttgcagctgcttagacgctggatttttttcgggt

SEQ ID NO: 1420 - RNA, 315 nt, synthetic construct
  source 1..315: mol_type = other RNA
acacggtttttaagaaagaacttctaaccccactccaccgcccaacggtcacgtgacgcgcctgcgtcctcgcctcaaggttttttctggtcgcatattggctgttaactcggctacggggtgtagcgaggtgcattccggaagtaggtcctttgacttttgcttcctctacggaggcaagtaacaacccggcggtcgacgcttagcggaagttcgtcaagtcgcagttgcccccgcacagcggatgtgggtcgcctcttaggtgacgctgggaagtgcctgcagccttcgccgctgccttctggttgaagcact

SEQ ID NO: 1421 - RNA, 101 nt, synthetic construct
  source 1..101: mol_type = other RNA
ggcagggtggagaggtgggctcttcctgcttcccactcatcttatagctttctttccccagatccgaattcgagatccaaaccaaggaggaaaggatatca

SEQ ID NO: 1422 - RNA, 119 nt, synthetic construct
  source 1..119: mol_type = other RNA
ccttctgatggtgaatgggaactcccttcctcctgcagcagcctgcctgcagctgtcctggtagaacagtgtggacattgcagaagctgtcactgccccagaaagaaagcaccccagag

SEQ ID NO: 1423 - RNA, 229 nt, synthetic construct
  source 1..229: mol_type = other RNA
acttccggtggagggccgcctctgagcgggcggcgggccgacggcgagcgcgggcggcggcggtgacggaggcgccgctgccagggggcgtgcggcagcgcggcggcggcggcggcggcggcggcggcggaggcggcggcggcggcggcggcggcggcggctgggcctcgagcgcccgcagcccacctctcgggggcgggctcccggcgctagcagggctgaagagaag

SEQ ID NO: 1424 - RNA, 918 nt, synthetic construct
  source 1..918: mol_type = other RNA
ggactctgagggctttttggagctcgctatgcttaacctggagatgattaaggccccgcttcctggcctcccagcctctaatgccaaaagataagggagaggctggcgtgtgaccccgttttgagtcaggtggacagagggctggccaccttcggaaccatgggtgcaatacggagtcagacctcaatacaagcccactctttcacatatttgaacttttttcacatatcaactttttttgttcactgtgcagggattgttcattgctgctggaggaagatcatggactgtcgcgggaaactgaagtggttgagtatccactagtcgtggatgagggcagtgacttcgcagttttttgcgaattacacatctctttgattatgttgtgactagttttgttagatagtcatttagtgtttgggatacctgttaagccctttgtccagggactgtggttggatttatgaattatttggacggttgtccacttgaaagaactgacagtagcttcataacaatgttacaaatctcgttctaagattaagctgttgaacctatatttgccattagcgcttaatttttgaagtattatttttatgaatcaagccctggaaaaggacaagatatttgaatgaaatagcacccataatggagaacttcacagttgctactcctgtgataggtttatcttagtttcattgtggtataaatggaatagcaggtgttgtcaggtacaaggtttgtagcttgccaatatgttcattaccaacactgcagattcccattgagttggtgggggttttgttacctttgttttttttctcagcaaaataattctataactttttgtttgtgacaagaaatggactttcagtttacttaagattaatacttcttgaatgataaaatcattttgcc

SEQ ID NO: 1425 - RNA, 216 nt, synthetic construct
  source 1..216: mol_type = other RNA
ataacggctagcctgaggagctgctgcgacagtccactacctttttcgagagtgactcccgttgtcccaaggcttcccagagcgaacctgtgcggctgcaggcaccggcgcgtcgagtttccggcgtccggaaggaccgagctcttctcgcggatccagtgttccgtttccagcccccaatctcagagcggagccgacagagagcagggaaccggc

SEQ ID NO: 1426 - RNA, 133 nt, synthetic construct
  source 1..133: mol_type = other RNA
acaaggcagcctcgctcgagcgcaggccaatcggctttctagctagagggtttaactcctatttaaaaagaagaacctttgaattctaacggctgagctcttggaagacttgggtccttgggtcgcaggcatc

SEQ ID NO: 1427 - RNA, 217 nt, synthetic construct
  source 1..217: mol_type = other RNA
aatgcgcctgcagctcgcgctcccgcgccgatcccgagagcgtccgggccgccgtgcgcgagcgagggagggcgcgcgcgcggggggggcgcgcttgtgagtgcgggccgcgctctcggcggcgcgcatgtgcgtgtgtgctggctgccgggctgccccgagccggcggggagccggtccgctccaggtggcgggcggctggagcgagggagcggac

SEQ ID NO: 1428 - RNA, 1177 nt, synthetic construct
  source 1..1177: mol_type = other RNA
gcgcgggaggaggagaagcagtggggaggcgcagccgctcacctgcggggcagggcgcggaggagggacccgggctgcgcgctctcgggccgaggaaccaggacgcgcccggagcctcgcacgcggccaagctcggggcgtcccctcccctcggccgggcgaactcaaggggcgcagctctttgctttgacagagctggccggcggaggcgtgcagagcggcgagccggcgagccaggctgagaaactcgagccgggaacaaagaggggtcggactgagtgtgtgtgtcggctcgagctccgggcagaggcatttgggcccgaggcccccgctgtgactccccgagactccgcagtgccctccactgcggagtccccgcgcttgccggcaaaaactttattcttggcaaacttctctttctcttcccctcctcctcggcccccatcttctgctcctcctccttctctagcagattaaatgagcctcgagaagaaaaaccgaagcgaaagggaagaaaataagaagatctaaaacggacatctccagcgtgggtggctcctttttctttttctttttttcccacccttcaggaagtggacgtttcgttatcttctgatccttgcaccttcttttggggcaaacggggcccttctgcccagatcccctctcttttctcggaaaacaaactactaagtcggcatccggggtaactacagtggagagggtttccgcggagacgcgccgccggaccctcctctgcactttggggaggcgtgctccctccagaaccggcgttctccgcgcgcaaatcccggcgacgcggggtcgcggggtggccgccggggcagcctcgtctagcgcgcgccgcgcagacgcccccggagtcgccagctaccgcagccctcgccgcccagtgcccttcggcctcgggggcgggcgcctgcgtcggtctccgcgaagcgggaaagcgcggcggccgccgggattcgggcgccgcggcagctgctccggctgccggccggcggccccgcgctcgcccgccccgcttccgcccgctgtcctgctgcacgaacccttccaactctcctttcctcccccacccttgagttacccctctgtctttcctgctgttgcgcgggtgctcccacagcggagcggagattacagagccgccggg

SEQ ID NO: 1429 - RNA, 125 nt, synthetic construct
  source 1..125: mol_type = other RNA
ttctccccgtgctcccccgttcttccctgcggagtgcgctgcgccgcccagccctgtcgccccccggaggtgatccctccctcctgcctgcccgccagcctgacctgtgcccggctcgcgggccg

SEQ ID NO: 1430 - RNA, 199 nt, synthetic construct
  source 1..199: mol_type = other RNA
gcaatccggagtgtcagctctccatctgtctctgcctggcaggcgcacgcgcccagcaccctgcctccggcgatgccgccccagcccctctgatggccctcctctctgctgccactcattccagaacaggaggcatgagcccggaacgcgcttgcttttaggagacagccactttctgtgtggtacgctggattcaagg

SEQ ID NO: 1431 - RNA, 150 nt, synthetic construct
  source 1..150: mol_type = other RNA
atatcaacctgtttcctcctcctccttctcctcctcctccgtgacctcctcctcctctttctcctgagaaacttcgccccagcggtgcggagcgccgctgcgcagccggggagggacgcaggcaggcggcgggcagcgggaggcggcagc

SEQ ID NO: 1432 - RNA, 653 nt, synthetic construct
  source 1..653: mol_type = other RNA
cagaataatgacatggttccttccatcctccaaaggtgaccaataatagtttgtaagtatcattatgaactaatgaattttcaacatatttgatatatttcaatccattgccatcattgttcttatcgatatttgagttggctcactttgccagtaagagtctattcaaattggcttctgagtccatttgacacaacacctttgatctttgacagtttccttggttttaggtgctagatgatttctcaggctcaccttagacatttcctgccacagacttagaatcagccatttctctaaggaccctgattccatttcatgagaaatgatagagaccacaatcaaaacaagtcatgaatttatactgatattttcaattcaaattaaagatgaggtttttgctaaatttttttgagtttatatttgtatgtcttatgctgaaaaatcttgtttcctaattagtaacataattattcatttgatgggtaaatattttagggccgattctttggttttatagccaagataccctgttgataaagtcttgtgggagcaattataagactggcttattttgaagctttttaaaaaagacatccttacctgttttaactgtagattatattaacttaaataggtacagcccacgcttg

SEQ ID NO: 1433 - RNA, 396 nt, synthetic construct
  source 1..396: mol_type = other RNA
ctcgagctgccgttgcaaagccaactttggaaaaagttttttgggggagacttgggccttgaggtgcccagctccgcgctttccgattttgggggcctttccagaaaatgttgcaaaaaagctaagccggcgggcagaggaaaacgcctgtagccggcgagtgaagacgaaccatcgactgccgtgttccttttcctcttggaggttggagtcccctgggcgcccccacacggctagacgcctcggctggttcgcgacgcagccccccggccgtggatgctcactcgggctcgggatccgcccaggtagcggcctcggacccaggtcctgcgcccaggtcctcccctgccccccagcgacggagccggggccgggggcggcggcgcccgggggcca

SEQ ID NO: 1434 - RNA, 391 nt, synthetic construct
  source 1..391: mol_type = other RNA
catcaccgaacgatgagagaggactacagcgacaaagtgaaagccagccactggagtcgcagcccgcctcggccgccgcgggagcggttcgagttgggagacggccggaagccagtaaaagaagagaaaatggaagaaagggacctgctgtccgacttacaggacatcagcgacagcgagaggaagaccagctcggccgagtcctcgtcagcggaatcaggctcaggttctgaggaagaagaggaggaggaggaagaggaggaggaggaagggagcaccagtgaagaatcagaggaggaggaggaggaagaggaagaggaggaggaggagaccggcagcaactctgaggaggcatcagagcagtctgccgaagaagtaagtgaggaagaaa

SEQ ID NO: 1435 - RNA, 147 nt, synthetic construct
  source 1..147: mol_type = other RNA
acaaggcagcctcgctcgagcgcaggccaatcggctttctagctagagggtttaactcctatttaaaaagaagaacctttgaattctaacggctgagctcttggaagacttgggtccttgggtcgcaggtgggagccgacgggcatc

SEQ ID NO: 1436 - RNA, 31 nt, synthetic construct
  source 1..31: mol_type = other RNA
cttctgccttttaaaatccagtcccaggaca

SEQ ID NO: 1437 - RNA, 294 nt, synthetic construct
  source 1..294: mol_type = other RNA
gctagctcgggccgggaggagccgcagccggaggagggggaggaggaagaagagaaggaagaggagagggggccgcagtggcgactcggcgctcggaagccgggctcatggacgggtgaggcggcggtgtgcgcagacagtgctccagccgcgcgcgctccccaggccctggcccgggcctcgggccggggaggaagagtagctcgccgaggcgccgaggagagcgggccgccccacagcccgagccggagagggagcgcgagccgcgccggccccggtcgggcctccgaaacc

SEQ ID NO: 1438 - RNA, 156 nt, synthetic construct
  source 1..156: mol_type = other RNA
ctcgccgctgccggggacgggagccgcgcgccaggccgggcggcgggtggcgggctgcgcgccggggttcatgagcctccgggcggcccgcggccccgggagcctgcgccgtgactcaccccccgcccccgcttgtgtctcgtccctcccggcagg

SEQ ID NO: 1439 - RNA, 149 nt, synthetic construct
  source 1..149: mol_type = other RNA
atgggaacgtagaactcgtcatgacacttgtggtaaaataacattattcgcttgcaaaaaacgatgtactttgacaatttaagacacaaaaaaacacaacctcgacaatttaggagttagagaggtcgtgttttgagattagtgagact

SEQ ID NO: 1440 - RNA, 485 nt, synthetic construct
  source 1..485: mol_type = other RNA
acttttggtgggcatttaaaaatgtgtgtgtatgtgtatatatgtatgtgtatgtatgtgtatatatgtatatgtatgtatgtatcgcgtgtatgtgtgtatgtatgcatgtgtatgtatgtatatgcatgtatgtgtatgtgtatatatgtatgtgtgtgtatgtatatgtatgtgtgtgtatgtatatgtgtgtgtatgtgtatgtgtgtgtgtatgtgtgtgtgtatgtatgtatgtatgtatatgtattatacacatatacacatattggtttttttaatcatttgagagttagttgaagataaaaacccatcacccctaaatgtattccaaagaataagaacattgttttatacatagcacacttaacaaaatcaagaaatttaacattaatacagtactgttacctaatccgtagtcgattttcaaattttgtcagttgttccaataatgtcctttatatattccccgcccagctcgag

SEQ ID NO: 1441 - RNA, 1137 nt, synthetic construct
  source 1..1137: mol_type = other RNA
aaaaaataaaaccctcccccaccacctccttctccccacccctcgccgcaccacacacagcgcgggcttctagcgctcggcaccggcgggccaggcgcgtcctgccttcatttatccagcagcttttcggaaaatgcatttgctgttcggagtttaatcagaagacgattcctgcctccgtccccggctccttcatcgtcccatctcccctgtctctctcctggggaggcgtgaagcggtcccgtggatagagattcatgcctgtgtccgcgcgtgtgtgcgcgcgtataaattgccgagaaggggaaaacatcacaggacttctgcgaataccggactgaaaattgtaattcatctgccgccgccgctgccaaaaaaaaactcgagctcttgagatctccggttgggattcctgcggattgacatttctgtgaagcagaagtctgggaatcgatctggaaatcctcctaatttttactccctctccccccgactcctgattcattgggaactttcaaatcagctataactggagagtgctgaagattgatgggatcgttgccttatgcatttgttttggttttacaaaaaggaaacttgacagaggatcatgctgtacttaaaaaatacaagtaagtctcgcacaggaaattggtttaatgtaactttcaatggaaacctttgagattttttacttaaagtgcattcgagtaaatttaatttccaggcagcttaatacattgtttttagccgtgttacttgtagtgtgtatgccctgctttcactcagtgtgtacagggaaacgcacctgattttttacttattagtttgttttttctttaacctttcagcatcacagaggaagtagactgatattaacaatacttactaataataacgtgcctcatgaaataaagatccgaaaggaattggaataaaaatttcctgcgtctcatgccaagagggaaacaccagaatcaagtgttccgcgtgattgaagacaccccctcgtccaagaatgcaaagcacatccaataaaatagctggattataactcctcttctttctctgggggccgtggggtgggagctggggcgagaggtgccgttggcccccgttgcttttcctctgggaagg

SEQ ID NO: 1442 - RNA, 170 nt, synthetic construct
  source 1..170: mol_type = other RNA
tatttagaattagaatgtttcttagcggtcgtgtagttatttttatgtcataagtggataatttgttagctcctataacaaaagtctgttgcttgtgtttcacattttggatttcctaatataatgttctctttttagaaaaggtggacaagtcctattttcaagagaag

SEQ ID NO: 1443 - RNA, 62 nt, synthetic construct
  source 1..62: mol_type = other RNA
aaacctttgcatcttctgatagtctagccaaggtccaagaagtagcaagctggcttttggaa

SEQ ID NO: 1444 - RNA, 127 nt, synthetic construct
  source 1..127: mol_type = other RNA
ctcttggtggagcccatattgaaccctgcccatgagcttcaggccatagggagggtgcaccgaattggacagacaaaacctactattgtacacagattcttaattaaagcaacaatagaagaaagaa

SEQ ID NO: 1445 - RNA, 211 nt, synthetic construct
  source 1..211: mol_type = other RNA
gcgctcaatcctttgggaactaaaccggagccagaggaaggggagaatgagtgtcgcctgctaaagaaagtcaagtctgaaaagcaatgatgttgtccactgggcatgtactgaccaatgtggcaggtctgagaacatagctgaagctgaaaataggaaagctgggggcaaggaagagccttgaatcttgaggtgggacgttgactctaag

SEQ ID NO: 1446 - RNA, 249 nt, synthetic construct
  source 1..249: mol_type = other RNA
gaagccctcaggagccctggggtgggtctccttgccctgtgaacgctccatttgtgttattgaatccaacataaatgcagcattgtcttcagaggtgagcaatggccgtggccggaggtgcgcatgggatgcaggcggcgtgtgctgctgttgattttctctgctctgctcttagcttactttagcagatagtggagtttcacgtggcagtccggtaaaccaaggcagtgtgaacatcccttccccaca

SEQ ID NO: 1447 - RNA, 223 nt, synthetic construct
  source 1..223: mol_type = other RNA
ttcagaagagaattccccggcagcagcgtggcgctcagcatgttccgtgtctgactgttttgattgtctctcagtccagttgacaaattccttttaagatgaaatttgaattaatttgcagaacttgtacaaatctccaagaaaacagcttaaggaacagattaaagaatgaatgccttaggaattaaagcattaatagctcttgagtagactggatggaaag

SEQ ID NO: 1448 - RNA, 128 nt, synthetic construct
  source 1..128: mol_type = other RNA
agagccgccctgtccgcgccgcgcctcggcagccggaacagggccgccgtcggggagccccaacacacggtccacagctcatcatgatggacttggagctgccgccgccgggactcccgtcccagcag

SEQ ID NO: 1449 - RNA, 277 nt, synthetic construct
  source 1..277: mol_type = other RNA
ggccatgcagcgacggccgccgcggagctccgagcagcggtagcgcccccctgtaaagcggttcgctatgccggggccactgtgaaccctgccgcctgccggaacactcttcgctccggaccagctcagcctctgataagctggactcggcacgcccgcaacaagcaccgaggagttaagagagccgcaagcgcagggaaggcctccccgcacgggtgggggaaagcggccggtgcagcgcggggacaggcactcgggctggcactggctgctaggg

SEQ ID NO: 1450 - RNA, 398 nt, synthetic construct
  source 1..398: mol_type = other RNA
gacaggaggaaacgcagcgccagcagcatctcatctaccctccttgacacctccccgtggctccagccagaccctagaggtcagccttgcggaccaacaggaggactcccagctttcccttttcaagaggtccccagacaccggccaccctcttccagcccctgcggccagtgcaaggaggcaccaatgctctgaggctgtcgcgtggtgcagcgtcgagcatcctcgccgaggtcctttctgctgcctgtcccgcctcaccccgctccatcacaccagctggccctctttgcttccttttcccagaatcgttaagccccgactcccactagcacctcgtaccaacctcgccccaccccatcctcctgccttcccgcgctccggtgtcccccgctgcc

SEQ ID NO: 1451 - RNA, 28 nt, synthetic construct
  source 1..28: mol_type = other RNA
tgaaaatttttccttacaaacagatatg

SEQ ID NO: 1452 - RNA, 393 nt, synthetic construct
  source 1..393: mol_type = other RNA
gaccggtcagcggactcaccggccagggcgctcggtgctggaatttgatattcattgatccgggttttatccctcttcttttttcttaaacatttttttttaaaactgtattgtttctcgttttaatttatttttgcttgccattccccacttgaatcgggccgacggcttggggagattgctctacttccccaaatcactgtggattttggaaaccagcagaaagaggaaagaggtagcaagagctccagagagaagtcgaggaagagagagacggggtcagagagagcgcgcgggcgtgcgagcagcgaaagcgacaggggcaaagtgagtgacctgcttttgggggtgaccgccggagcgcggcgtgagccctcccccttgggatcccgc

SEQ ID NO: 1453 - RNA, 165 nt, synthetic construct
  source 1..165: mol_type = other RNA
cgcggtgcccgcggttgcaacgggatcccgggcgctgcagcttgggaggcggctctccccaggcggcgtccgcggagacacccatccgtgaaccccaggtcccgggccgccggctcgccgcgcaccaggggccggcggacagaagagcggccgagcggctcgagg

SEQ ID NO: 1454 - RNA, 665 nt, synthetic construct
  source 1..665: mol_type = other RNA
ggtgctggaggaggaaaccggcggagcagcttccccactctcagttgcgcttctggcgatggcgatcagaggtcctgctgcgctctccgccgcgctctacctccattagccgcgctgcgcggtgctgcgccctcgccggtgcctctctcctgggtcccaggatcggcccccaccatccaggcacgacccccttccccggcccctcggcctttcccccaactcggccatctccgacccggggcgcgtgttccccccggcccggcgccttctctccctccgggggcacccgctccctagccccggcccggccctccccgcggcgcagcacggagtctcggcgtcccatggcgcaacctacggcctcggcccagaagctggtgcggccgatccgcgccgtgtgccgcatcctgcagatcccggagtccgacccctccaacctgcggccctagagcgcccccgccgccccgggggaaggagagcgcgagcgcgctgagcagacagagcgggagaacgcgtcctcgcccgccggccgggaggccccggagctggcccatggggagcaggcgcccggtgccggccacgacgaccgccaccgcccgcgccgcgaccggccggtgaagcccagggacccccctctgggagagccccatgagggcaggagagtg

SEQ ID NO: 1455 - RNA, 139 nt, synthetic construct
  source 1..139: mol_type = other RNA
cttttttagcgccatctgctcgcggcgccgcctcctgctcctcccgctgctgctgccgctgccgccctgagtcactgcctgcgcagctccggccgcctggctccccatactagtcgccgatatttggagttcttacaac

SEQ ID NO: 1456 - RNA, 80 nt, synthetic construct
  source 1..80: mol_type = other RNA
atcttcttggagcgctttaggctggccggcggcgctgggaggtggagtcgttgctgttgctgtttgtgagcctgtggcgc

SEQ ID NO: 1457 - RNA, 348 nt, synthetic construct
  source 1..348: mol_type = other RNA
aggaatgcgggatcctggggttccccgcacgtggctggtgcccaggcagttccgcggttgcttagagacgggactgtggctgccctcatccccattgcgtcttttttttttttttttttttttacctccaccgccttctagtctcaccgaaggcttgtggccatctctgtaaagtttctggggaggtgggcacggggtaaacgccggagggttctgtggagcctatgggactgactggaggccaaagaactttgggccgcagatgtacaccagcgtcactcttttggtctgttagggccttcatcgctcacatcaggtttcagtgtgaaacgggaaaacatagccgca

SEQ ID NO: 1458 - RNA, 120 nt, synthetic construct
  source 1..120: mol_type = other RNA
ctgcccaccgggcccaccgcgccgccaccccgaccccgctgcgcacggcctgtccgctgcacaccagcttgttggcgtcttcgtcgccgcgctcgccccgggctactcctgcgcgccaca

SEQ ID NO: 1459 - RNA, 181 nt, synthetic construct
  source 1..181: mol_type = other RNA
agccctctctcccgccgcccgcccgccacccgccagcccaggtgcccgcccgccagtcagctagtccgtcggtccgcgcgtccctctgtcccggagcccgcagatcgcgacccagagcgcgcggggccgagagccgagagacagtcccgggcgcagcgcggagctccgggccccgagatcc

SEQ ID NO: 1460 - RNA, 159 nt, synthetic construct
  source 1..159: mol_type = other RNA
cggccccagaaaacccgagcgagtagggggcggcgcgcaggagggaggagaactgggggcgcgggaggctggtgggtgtggggggtggagatgtagaagatgtgacgccgcggcccggcgggtgccagattagcggacgcggtgcccgcggttgcaacg

SEQ ID NO: 1461 - RNA, 190 nt, synthetic construct
  source 1..190: mol_type = other RNA
gcctggcgcgcagagtgcaccttcctgagctcgagcggtccagcgccaagttcggggtttggggttggagcggctggtcacgtggctggcccgcggcggtgcgcggggcgttgggtcagcgggtctgggactggtggcaccggcggcggcgtaggacggaggcgtcgctaggcagcttcgaaccagtgca

SEQ ID NO: 1462 - RNA, 257 nt, synthetic construct
  source 1..257: mol_type = other RNA
acaaggcagcctcgctcgagcgcaggccaatcggctttctagctagagggtttaactcctatttaaaaagaagaacctttgaattctaacggctgagctcttggaagacttgggtccttgggtcgcaggtgggagccgacggggtctcactccattgcccaggccagagtgcggggatatttgataagaaacttcagtgaaggccgggcgcggtggctcatgcccgtaatcccagcattttcggaggccgaggcatc

SEQ ID NO: 1463 - RNA, 107 nt, synthetic construct
  source 1..107: mol_type = other RNA
cctgccctggtgaaaatgcttggttcaccagtggattctgtgttgttttatgccattacaactctccacaaccttttattacatcaagaaggagctaaaatggcagt

SEQ ID NO: 1464 - RNA, 231 nt, synthetic construct
  source 1..231: mol_type = other RNA
gtcatatctccgtacctcacttcctgacacaaacaagttttcactgttgtcagcaacaaagccctaatatagctgcggaagagaaaaactgcattgcattttgcctcctgcaagcatcatcaacagttactggaggaacgtaattccagaaagcttgaaagccgtggtgatggtaattatgtatcaaatgcctggttctatttctgttattattgttttgtcatttctgtt

SEQ ID NO: 1465 - RNA, 167 nt, synthetic construct
  source 1..167: mol_type = other RNA
atatagagacgtttccgcctcctgcttgaaactaacccctctttttctccaaaggagtgcttgtggagatcggatcttttctccagcaattgggggaaagaaggctttttctctgaattagcttagtgtaaccagcggcgtatattttttaggcgccttttcgaaaa

SEQ ID NO: 1466 - RNA, 240 nt, synthetic construct
  source 1..240: mol_type = other RNA
cctcccctggggaggctcgcgttcccgctgctcgcgcctgcgccgcccgccggcctcaggaacgcgccctcttcgccggcgcgcgccctcgcagtcaccgccacccaccagctccggcaccaacagcagcgccgctgccaccgcccaccttctgccgccgccaccacagccaccttctcctcctccgctgtcctctcccgtcctcgcctctgtcgactatcaggtgaactttgaaccagg

SEQ ID NO: 1467 - RNA, 81 nt, synthetic construct
  source 1..81: mol_type = other RNA
tcttcaaattggaattatagaaagtagagggagggatagtctaccgtctctcactggattggtgccacctaaaacattgtt

SEQ ID NO: 1468 - RNA, 202 nt, synthetic construct
  source 1..202: mol_type = other RNA
agagaaggcctcgcacaaaacactgtacaaacccgaaaggaagtctgagagacgaaccgccttcctccctgaagcttctagaactggagcagaaagaaggtgtggcccagggccagccccgcctcctccccgggcggaagctgtgtcagttgccggaagtcggcgtgaggtggggcttatgcggcggcgtggtgaaatagat

SEQ ID NO: 1469 - RNA, 169 nt, synthetic construct
  source 1..169: mol_type = other RNA
ggcgccgcggggccgcgcgtccaggcggcgagcggaagtgggtgtgagagcggaagtggccggctagagccgggggctgggcggggaccgggcttgtcggtgaagcggcagtggcggcggcggcggcggctcggcaggcgggttcaggcttcgggggccagccgccgcc

SEQ ID NO: 1470 - RNA, 99 nt, synthetic construct
  source 1..99: mol_type = other RNA
tggagttggggagttgcctggagggcgggagggaggcggcggaggaagagggcgagcctgaggtgaaaaagcggcgacttctgtgtgtggagtttgcct

SEQ ID NO: 1471 - RNA, 188 nt, synthetic construct
  source 1..188: mol_type = other RNA
gcgcccgccgtgtgagcagcagcagcggctggtctgtcaaccggagcccgagcccgagcagcctgcggccagcagcgtcctcgcaagccgagcgcccaggcgcgccaggagcccgcagcagcggcagcagcgcgccgggccgcccgggaagcctccgtccccgcggcggcggcggcggcggcggcaac

SEQ ID NO: 1472 - RNA, 100 nt, synthetic construct
  source 1..100: mol_type = other RNA
gacagctcaagggactcagccaactggctcacgcctccccttcagcttctcttcacgcactccaagatctaaaccgagaatcgaaactaagctggggtcc

SEQ ID NO: 1473 - RNA, 263 nt, synthetic construct
  source 1..263: mol_type = other RNA
aggagaaggagaaggaggaggactaggaggaggaggacggcgacgaccagaaggggcccaagagagggggcgagcgaccgagcgccgcgacgcggaagtgaggtgcgtgcgggctgcagcgcagaccccggcccggcccctccgagagcgtcctgggcgctccctcacgccttgccttcaagccttctgcctttccaccctcgtgagcggagaactgggagtggccattcgacgacagtgtggtgtaaaggaattcattagcc

SEQ ID NO: 1474 - RNA, 368 nt, synthetic construct
  source 1..368: mol_type = other RNA
gtcacttcctgccgggctgcgggcgcctgagcggctcttcagcgtttgcgccggcggctgccgcgtctctctcggctcccgcttcctttgaccgcctcccccccccggcccggcggcgcccgcctcctccacggccactccgcctcttccctcccttcgtcccttcttcctctcccttttttccttcttccttcccctcctcgccgccaccgcccaggaccgccggccgggggacgagctcggagcagcagccagagtttattaaccacttaacctctcagaactgaacaaagacaacattgttcctggaacgccctctttttaaaaaagaaagcataacccctactgtagaactaaatgcactgtgc

SEQ ID NO: 1475 - RNA, 293 nt, synthetic construct
  source 1..293: mol_type = other RNA
gtcacttcctgccgggctgcgggcgcctgagcggctcttcagcgtttgcgccggcggctgccgcgtctctctcggctcccgcttcctttgaccgcctcccccccccggcccggcggcgcccgcctcctccacggccactccgcctcttccctcccttcgtcccttcttcctctcccttttttccttcttccttcccctcctcgccgccaccgcccaggaccgccggccgggggacgagctcggagcagcagccagaaagcataacccctactgtagaactaaatgcactgtgc

SEQ ID NO: 1476 - RNA, 339 nt, synthetic construct
  source 1..339: mol_type = other RNA
gtcacttcctgccgggctgcgggcgcctgagcggctcttcagcgtttgcgccggcggctgccgcgtctctctcggctcccgcttcctttgaccgcctcccccccccggcccggcggcgcccgcctcctccacggccactccgcctcttccctcccttcgtcccttcttcctctcccttttttccttcttccttcccctcctcgccgccaccgcccaggaccgccggccgggggacgagctcggagcagcagccaggtagaactttagacttcatagcactgaattaacctgcactgaaagctgtttacctgcatttgttcacttttgttgaaagtgacc

SEQ ID NO: 1477 - RNA, 451 nt, synthetic construct
  source 1..451: mol_type = other RNA
gtcacttcctgccgggctgcgggcgcctgagcggctcttcagcgtttgcgccggcggctgccgcgtctctctcggctcccgcttcctttgaccgcctcccccccccggcccggcggcgcccgcctcctccacggccactccgcctcttccctcccttcgtcccttcttcctctcccttttttccttcttccttcccctcctcgccgccaccgcccaggaccgccggccgggggacgagctcggagcagcagccagagtttattaaccacttaacctctcagaactgaacaaagacaacattgttcctggaacgccctctttttaaaaaaggtagaactttagacttcatagcactgaattaacctgcactgaaagctgtttacctgcatttgttcacttttgttgaaagtgaccatgtctcaagttcaagtgcaagttcagaacccatctg

SEQ ID NO: 1478 - RNA, 537 nt, synthetic construct
  source 1..537: mol_type = other RNA
gtcacttcctgccgggctgcgggcgcctgagcggctcttcagcgtttgcgccggcggctgccgcgtctctctcggctcccgcttcctttgaccgcctcccccccccggcccggcggcgcccgcctcctccacggccactccgcctcttccctcccttcgtcccttcttcctctcccttttttccttcttccttcccctcctcgccgccaccgcccaggaccgccggccgggggacgagctcggagcagcagccaggtggagttttgctcttgtcgcccaggctggagtgcagtggcgtgatctcggctcactgcaacctccacctcccaggttcaagcgattttcccacttcagcctcccgataagctgagattacagagtttattaaccacttaacctctcagaactgaacaaagacaacattgttcctggaacgccctctttttaaaaaaggtagaactttagacttcatagcactgaattaacctgcactgaaagctgtttacctgcatttgttcacttttgttgaaagtgacc

SEQ ID NO: 1479 - RNA, 381 nt, synthetic construct
  source 1..381: mol_type = other RNA
gccggagcggccaggccgccgtctgcccgtcccgctggacgtcccgcggtccgccctcccgtgcgtccgtctgccggtgagcccgcccgcccgccggcccagaacagagaacagaagctcagagaagtgaagcaacttgcccagctatgagagacagagccaggatttgaaaccagatgaggacgctgaggcccagagagggaaagccacttgcctagggacacacagcggggagaggtggagcagggcctctatttcgagacccctgactccacacctggtgtttgtgccaagaccccaggctgcctcccaggtcctctgggacagcccctgccttctaccaggaccatgggtagcaacaagagcaagcccaaggatgcc

SEQ ID NO: 1480 - RNA, 336 nt, synthetic construct
  source 1..336: mol_type = other RNA
aggtttcagtagcggcgctgcgcgcaggccgggaacacgaggccaagagccgcagccccagccgccttggtgcagcgtacaccggcactagcccgcttgcagccccaggattagacagaagacgcgtcctcggcgcggtcgccgcccagccgtagtcacctggattacctacagcggcagctgcagcggagccagcgagaaggccaaaggggagcagcgtcccgagaggagcgcctcttttcagggaccccgccggctggcggacgcgcgggaaagcggcgtcgcgaacagagccagattgagggcccgcgggtggagagagcgacgcccgagggg

SEQ ID NO: 1481 - RNA, 213 nt, synthetic construct
  source 1..213: mol_type = other RNA
gtgtgaatgcttcattcgcctcacaaacaaccacagaaccacaagtgcggtgcaaactttctccaggaggacagcaagaagtctctggtttttaaatggttaatctccgcaggtcactaccagccaccgagaccaacagagtcatttaaggctgcaagcagtatttacaacagagggtacaagttctatctgaaaaaaaaaggagggactatg

SEQ ID NO: 1482 - RNA, 105 nt, synthetic construct
  source 1..105: mol_type = other RNA
atgagcaaggcgtttgggctcctgaggcaaatctgtcagtccatcctggctgagtcctcgcagtccccggcagatcttgaagaaaagaaggaagaagacagcaac

SEQ ID NO: 1483 - RNA, 212 nt, synthetic construct
  source 1..212: mol_type = other RNA
agggccagacgttcttcgccgagagtcgtcggggtttcctgcttcaacagtgcttggacggaacccggcgctcgttccccaccccggccggccgcccatagccagccctccgtcacctcttcaccgcaccctcggactgccccaaggcccccgccgccgctccagcgccgcgcagccaccgccgccgccgccgcctctccttagtcgccgcc

SEQ ID NO: 1484 - RNA, 140 nt, synthetic construct
  source 1..140: mol_type = other RNA
gctccgccattcgcgggaaggcgtttgtggtgccagagaaaagtagccagagcggcgcagtggcggccgcgttctgtggttttccgctattcccccagacccgcaccttctcggcctctttgcggagaatcgtgaccaag

SEQ ID NO: 1485 - RNA, 319 nt, synthetic construct
  source 1..319: mol_type = other RNA
actaggactcaagatggccaccgcgcccgctagtcatctcgctagcccgcgcgccagtgagctggcacgagacacgcggtggcccacggcgtctggggacgatctccagcccttcgcacggggcggagcgcccgccttccctccaatcagcacgccgggccggctagccaggggccgcccgcgcgcggggtgtgtgaggacgcgctcccagtcgctgagtgcctgagccgggaagcagttgctgtggtacctgctgctgcccgagcggacgtagagcatcggacgcgggcgccgtggcgctgggcaggagggcgaagcc

SEQ ID NO: 1486 - RNA, 186 nt, synthetic construct
  source 1..186: mol_type = other RNA
tgcggccgggggaacccagtttccgaggaacttttcgccggcgccgggccgcctctgaggccagggcaggacacgaacgcgcggagcggcggcggcgactgagagccggggccgcggcggcgctccctaggaagggccgtacgaggcggcgggcccggcgggcctcccggaggaggcggctgcgcc

SEQ ID NO: 1487 - RNA, 1014 nt, synthetic construct
  source 1..1014: mol_type = other RNA
attctgaattatttccgcgatgcctggaacatcttcgactttgtgactgttctgggcagcatcaccgatatcctcgtgactgagtttgggaataacttcatcaacctgagctttctccgcctcttccgagctgcccggctcatcaaacttctccgtcagggttacaccatccgcattcttctctggacctttgtgcagtccttcaaggccctgccttatgtctgtctgctgatcgccatgctcttcttcatctatgccatcattgggatgcaggtgtttggtaacattggcatcgacgtggaggacgaggacagtgatgaagatgagttccaaatcactgagcacaataacttccggaccttcttccaggccctcatgcttctcttccggagtgccaccggggaagcttggcacaacatcatgctttcctgcctcagcgggaaaccgtgtgataagaactctggcatcctgactcgagagtgtggcaatgaatttgcttatttttactttgtttccttcatcttcctctgctcgtttctgatgctgaatctctttgtcgccgtcatcatggacaactttgagtacctcacccgagactcctccatcctgggcccccaccacctggatgagtacgtgcgtgtctgggccgagtatgaccccgcagcttggggccgcatgccttacctggacatgtatcagatgctgagacacatgtctccgcccctgggtctggggaagaagtgtccggccagagtggcttacaagcggcttctgcggatggacctgcccgtcgcagatgacaacaccgtccacttcaattccaccctcatggctctgatccgcacagccctggacatcaagattgccaagggaggagccgacaaacagcagatggacgctgagctgcggaaggagatgatggcgatttggcccaatctgtcccagaagacgctagacctgctggtcacacctcacaagtccacggacctcaccgtggggaagatctacgcagcc

SEQ ID NO: 1488 - RNA, 63 nt, synthetic construct
  source 1..63: mol_type = other RNA
gtgtccctgcagctgcgcggaggccacttctgcggcgccaccctgattgcgcccaacttcgtc

SEQ ID NO: 1489 - RNA, 95 nt, synthetic construct
  source 1..95: mol_type = other RNA
gtaagggaggggagttggatatacctcgcctaatatctcctgggttgacaccatcattattgtttattcttgtgctccaaaagccgagtcctctg

SEQ ID NO: 1490 - RNA, 98 nt, synthetic construct
  source 1..98: mol_type = other RNA
ttttaactaggttatttataatgtatttctgaaccacttggcagacaaattcacaacacttaatgttcatattttgagtaaaggaagctaaaaccatg

SEQ ID NO: 1491 - RNA, 518 nt, synthetic construct
  source 1..518: mol_type = other RNA
gtcgccgctgcagctccgggggctcccaggggagcgtgcgcggaacctccaggcccagcaggaccccggctgcggcgaggaggaaggagccagcctagcagcttctgcgcctgtggccgcgggtgtcctggaggcctctcggtgtgacgagtgggggacccgaaggctcgtgcgccacctccaggcctggacgctgccctccgtcttctgcccccaataggtgcgccggaccttcaggccctggggtgaattcagctgctcctacatcagcttccggaaccaccaaaaattcaaattgggattttccggagtaaacaagagcctagagccctttgctcaatgctggatttaatacgtatatatttttaagcgagttggttttttcccctttgatttttgatcttcgcgacagttcctcccacgcatattatcgttgttgccgtcgttttctctccccgcgtggctccttgacctgcgagggagagagaggacaccgaagccgggagctcgcagggacc

SEQ ID NO: 1492 - RNA, 94 nt, synthetic construct
  source 1..94: mol_type = other RNA
gaggcctagagccacatggttcagtccccgcctctgggcctctgtggggacagcctcacccttaagctagtcccttctcccctttgcagacgag

SEQ ID NO: 1493 - RNA, 147 nt, synthetic construct
  source 1..147: mol_type = other RNA
agtttcctcggcagcggtaggcgagagcacgcggaggagcgtgcgcgggggccccgggagacggcggcggtggcggcgcgggcagagcaaggacgcggcggatcccactcgcacagcagcgcactcggtgccccgcgcagggtcgcg

SEQ ID NO: 1494 - RNA, 278 nt, synthetic construct
  source 1..278: mol_type = other RNA
gcggccgcgggctcccgctaaccgcagcctccactcctctccccgcgcgccgcgcccccgccccgccccgcccggtctcgccggccgagcgtccgttggtccttgagcgcgtccgacagtctgtctgttcgcgatcctgccggagccccgccgccgccggcttggattctgaaaccttccttgtatccctcctgagacatctttgctgcaagatcgaggctgtcctctggtgagaaggtggtgaggcttcccgtcatattccagctctgaacagcaac

SEQ ID NO: 1495 - RNA, 335 nt, synthetic construct
  source 1..335: mol_type = other RNA
aggggacgcagcgaaaccggggcccgcgccaggccagccgggacggacgccgatgcccggggctgcgacggctgcagagcgagctgccctcggaggccggcgtggggaagatggcccagtccaccgccacctcccctgatgggggcaccacgtttgagcacctctggagctctctggaaccagacagcacctacttcgaccttccccagtcaagccgggggaataatgaggtggtgggcggaacggattccagcatggacgtcttccacctggagggcatgactacatctgtcatggcccagttcaatctgctgagcagcaccatggaccagatg

SEQ ID NO: 1496 - RNA, 160 nt, synthetic construct
  source 1..160: mol_type = other RNA
ggctgcctcgcaggggctgcgcgcagcggcaagaagtgtctgggctgggacggacaggagaggctgtcgccatcggcgtcctgtgcccctctgctccggcacggccctgtcgcagtgcccgcgctttccccggcgcctgcacgcggcgcgcctgggtaac

SEQ ID NO: 1497 - RNA, 194 nt, synthetic construct
  source 1..194: mol_type = other RNA
gcttggtgctgcatctcaatccctgtggccccaggagcagctgcggcaggaacatgtatggatttatcaacacctgtctgcaatctcttgtgatagagaaatttggtgaagaaacatgggaaaaattgaagtgtctccatggaagccatcctgaaactctttggagaatactttcaattctgaagatgtctggc

SEQ ID NO: 1498 - RNA, 177 nt, synthetic construct
  source 1..177: mol_type = other RNA
gacagggactggaagagaggacgcggtcgagtaggtgtgcaccagccctggcaacgagagcgtctaccccgaactctgctggccttgaggtggggaagccggggagggcagttgaggaccccgcggaggcgcgtgactggttgagcgggcaggccagcctccgagccgggtggacac

SEQ ID NO: 1499 - RNA, 174 nt, synthetic construct
  source 1..174: mol_type = other RNA
caggtgttgcggccccgcagcgcccgcgcgctcctctccccgactcggagcccctcggcggcgcccggcccaggacccgcctaggagcgcaggagccccagcgcagagaccccaacgccgagacccccgccccggccccgccgcgcttcctcccgacgcagagcaaaccgccca

SEQ ID NO: 1500 - RNA, 97 nt, synthetic construct; identical to SEQ ID NO: 15
  modified_base 9: mod_base = OTHER; note = thymine
  modified_base 11: mod_base = OTHER; note = thymine
  modified_base 18..23: mod_base = OTHER; note = thymine
  modified_base 25: mod_base = OTHER; note = thymine
  modified_base 31: mod_base = OTHER; note = thymine
  modified_base 33: mod_base = OTHER; note = thymine
  modified_base 36: mod_base = OTHER; note = thymine
  modified_base 38: mod_base = OTHER; note = thymine
  modified_base 41: mod_base = OTHER; note = thymine
  modified_base 43: mod_base = OTHER; note = thymine
  modified_base 46..49: mod_base = OTHER; note = thymine
  modified_base 51..52: mod_base = OTHER; note = thymine
  modified_base 57: mod_base = OTHER; note = thymine
  modified_base 68: mod_base = OTHER; note = thymine
  modified_base 72..75: mod_base = OTHER; note = thymine
  modified_base 77..78: mod_base = OTHER; note = thymine
  modified_base 80: mod_base = OTHER; note = thymine
  modified_base 84: mod_base = OTHER; note = thymine
  modified_base 86: mod_base = OTHER; note = thymine
  modified_base 88: mod_base = OTHER; note = thymine
  modified_base 91: mod_base = OTHER; note = thymine
  modified_base 94..96: mod_base = OTHER; note = thymine
  source 1..97: mol_type = other RNA

SEQ ID NO: 1501 - RNA, 121 nt, synthetic construct
  source 1..121: mol_type = other RNA
gcgctaatacgactcactatagggtttggcatatctaataattttctcattattagatatgccaaaccttttcttgaaggtggcatcaggaatgttttcttgcattcctgatgccaccttc

SEQ ID NO: 1502 - RNA, 112 nt, synthetic construct; identical to SEQ ID NO: 16
  source 1..112: mol_type = other RNA
